(19) United States
(12) Patent Application Publication
(10) Pub. No.: US 2024/0067972 A1
(43) Pub. Date: Feb. 29, 2024

(54) DIPEPTIDYL PEPTIDASE 4 (DPP4) IRNA COMPOSITIONS AND METHODS OF USE THEREOF

(71) Applicant: Alnylam Pharmaceuticals, Inc., Cambridge, MA (US)

(72) Inventors: James D. McIninch, Burlington, MA (US); Lucas D. BonDurant, Brookline, MA (US)

(21) Appl. No.: 18/125,167

(22) Filed: Mar. 23, 2023

Related U.S. Application Data
(63) Continuation of application No. PCT/US2021/051663, filed on Sep. 23, 2021.
(60) Provisional application No. 63/152,900, filed on Feb. 24, 2021.
(60) Provisional application No. 63/082,566, filed on Sep. 24, 2020.

(51) Int. Cl. C12N 15/113; A61P 3/00

(52) U.S. Cl. CPC C12N 15/1137; A61P 3/00; C12N 2310/11; C12N 2310/316; C12N 2310/3515

(57) ABSTRACT

The present invention relates to RNAi agents, e.g., dsRNA agents, targeting the dipeptidyl peptidase 4 (DPP4) gene. The invention also relates to methods of using such RNAi agents to inhibit expression of a DPP4 gene and to methods of treating or preventing a DPP4-associated disease, such as metabolic diseases, e.g., diabetes or lipid metabolism diseases, in a subject.

### RELATED APPLICATIONS

[0001] This application is a 35 § U.S.C. 111(a) continuation application which claims the benefit of priority to PCT/US2021/051663, filed on Sep. 23, 2021, which, in turn, claims the benefit of priority to U.S. Provisional Application No. 63/082,566, filed on Sep. 24, 2020, and U.S. Provisional Application No. 63/152,900, filed on Feb. 24, 2021. The entire contents of each of the foregoing applications are incorporated herein by reference.

### SEQUENCE LISTING

[0002] The instant application contains a Sequence Listing which has been submitted electronically in XML file format and is hereby incorporated by reference in its entirety. Said XML copy, created on Apr. 21, 2023, is named 121301_13703_SL.xml and is 13,580,133 bytes bytes in size.

### BACKGROUND OF THE INVENTION

[0003] Dipeptidyl peptidase 4 (DPP4), also known as adenosine deaminase binding protein or cluster of differentiation 26 (CD26), is a serine exopeptidase able to inactivate various oligopeptides and smaller peptides through the removal of dipeptides from the N-termini of the oligopeptides and smaller peptides having proline or alanine at the penultimate position.

[0004] DPP4 is a homodimer and an integral type II glycoprotein anchored to the membrane by its signal peptide. The primary structure consists of a short six amino acid cytoplasmic tail, a 22 amino acid transmembrane, a 738 amino acid extracellular portion comprised of a flexible stalk, glycosylation-rich region, cysteine-rich region and catalytic region with the catalytic triad Ser630, Asp708 and His740.

[0005] DPP4 can be shed from the cell membrane via proteolytic cleavage in a soluble form which maintains its enzymatic activity. DPP4 is expressed ubiquitously in many tissues and selectively degrades a variety of substrates including incretin hormones (such as glucose-dependent insulinotropic polypeptide (GIP) and glucagon-like peptide 1 (GLP-1)), neuropeptides, growth factors, and cytokines.

[0006] For example, it has been shown that DPP4 inactivates the incretin peptides, glucagon-like peptide-1, and glucose-dependent insulinotropic polypeptide to modulate postprandial islet hormone secretion and glycemia. Dipeptidyl peptidase-4 also has nonglycemic effects by controlling the progression of inflammation, which may be mediated more through direct protein-protein interactions than catalytic activity in the context of nonalcoholic fatty liver disease (NAFLD), obesity, and type 2 diabetes (T2D). Failure to resolve inflammation resulting in chronic subclinical activation of the immune system may influence the development of metabolic dysregulation. In addition, elevated circulating DPP4 activity as well as elevated soluble plasma levels of DPP4 have been found in number of metabolic diseases including diabetes, obesity, cardiovascular diseases, and nonalcoholic fatty liver diseases. Thus, through both its cleavage and regulation of the bioactivity of peptide hormones and its influence on inflammation, DPP4 exhibits a diverse array of effects that can influence the progression of metabolic disease.

[0007] Metabolic disease affects millions of people worldwide and patients with metabolic disease generally experience a loss of fat-free or lean muscle mass, an excess gain of fat mass, a lower metabolic rate, insulin resistance, lack of ability to regulate blood sugar, weight gain, increase in body mass index, increased blood pressure, and abnormal cholesterol or triglyceride levels. Patients with metabolic disease are at risk for developing major complications including diabetes, obesity, coronary artery disease, hypertension, stroke, atherosclerosis, congestive heart failure, or stroke.

[0008] In addition to the serious health consequences of metabolic disease, serious economic costs are associated with these diseases. For example, the total cost of treating diabetes and its complications in the United States has been estimated at $245 billion annually. The estimated annual health care costs of obesity-related illness are a staggering $190.2 billion or nearly 21% of annual medical spending. Substantial costs to both society and its citizens are incurred not only for direct costs of medical care for these metabolic diseases, but also for indirect costs, including lost productivity resulting from metabolic diseases-related morbidity and premature mortality.

[0009] Although much efforts have been made in this area of research, current treatments do not fully meet patient needs, and additional treatments applicable to a large majority of the affected patient population are highly desired.

[0010] Accordingly, there exists an unmet need for effective treatments for metabolic diseases, such as an agent that can selectively and efficiently silence the DPP4 gene using the cell's own RNAi machinery that has both high biological activity and in vivo stability, and that can effectively inhibit expression of a target DPP4 gene.

### SUMMARY OF THE INVENTION

[0011] The present disclosure provides RNAi agent compositions which effect the RNA-induced silencing complex (RISC)-mediated cleavage of RNA transcripts of a gene encoding Dipeptidyl peptidase 4 (DPP4). The DPP4 gene may be within a cell, e.g., a cell within a subject, such as a human. The present disclosure also provides methods of using the RNAi agent compositions of the disclosure for inhibiting the expression of a DPP4 gene or for treating a subject who would benefit from inhibiting or reducing the expression of a DPP4 gene, e.g., a subject having a DPP4-associated disorder, e.g., a subject having a metabolic disease, e.g., diabetes or a lipid metabolism disorder, or a subject at risk of developing a metabolic disease, e.g., diabetes or a lipid metabolism disorder.

[0012] Accordingly, in one aspect, the instant disclosure provides a double stranded ribonucleic acid (dsRNA) agent for inhibiting expression of a Dipeptidyl peptidase 4 (DPP4) gene, wherein the dsRNA agent comprises a sense strand and an antisense strand forming a double stranded region, wherein the sense strand comprises a nucleotide sequence comprising at least 15 contiguous nucleotides, with 0, 1, 2, or 3 mismatches, of a portion of the nucleotide sequence of any one of SEQ ID NOs:1-15, or a nucleotide sequence having at least 90% nucleotide sequence identity to a portion of the nucleotide sequence of any one of SEQ ID NOs:1-15, and the antisense strand comprises a nucleotide sequence comprising at least 15 contiguous nucleotides, with 0, 1, 2, or 3 mismatches, of the corresponding portion of the nucleotide sequence of any one of SEQ ID NOs:16-30, or a nucleotide sequence having at least 90% nucleotide sequence identity to a portion of the nucleotide sequence of any one of SEQ ID NOs:16-30; and wherein the sense strand or the antisense strand is conjugated to one or more lipophilic moieties.

[0013] In one aspect, the present invention provides a double stranded ribonucleic acid (dsRNA) agent for inhibiting expression of a DPP4 gene in a cell, comprising a sense strand and an antisense strand forming a double stranded region, wherein the antisense strand comprises a region complementary to part of an mRNA encoding a DPP4 gene (any one of SEQ ID NOs:1-15), wherein each strand independently is 14 to 30 nucleotides in length; and wherein the sense strand or the antisense strand is conjugated to one or more lipophilic moieties.

[0014] In yet another aspect, the present invention provides a double stranded RNAi agent for inhibiting expression of a a DPP4 gene in a cell, comprising a sense strand and an antisense strand forming a double stranded region, wherein the antisense strand comprises at least 15 contiguous nucleotides differing by no more than 3 nucleotides from any one of the antisense nucleotide sequences in any one of Tables 2-3 and 5-6, wherein each strand independently is 14 to 30 nucleotides in length; and wherein the sense strand or the antisense strand is conjugated to one or more lipophilic moieties.

[0015] In one embodiment, the sense strand or the antisense strand is a sense strand or an antisense strand selected from the group consisting of any of the sense strands and antisense strands in any one of Tables 2-3 and 5-6.

[0016] In one aspect, the present invention provides a double stranded RNAi agent for inhibiting expression of a DPP4 gene in a cell, comprising a sense strand and an antisense strand forming a double stranded region, wherein the antisense strand comprises at least 15 contiguous nucleotides differing by no more than 3 nucleotides from any one of the nucleotide sequence of nucleotides 1204-1226, 1208-1230, 1209-1231, 1210-1232, 1211-1233, 1212-1234, 1700-1722, 2223-2245, 2224-2246, 2225-2247, or 3232-3254 of SEQ ID NO:6, and the antisense strand comprises at least 15 contiguous nucleotides from the corresponding nucleotide sequence of SEQ ID NO:21, and wherein the sense strand or the antisense strand is conjugated to one or more lipophilic moieties.

[0017] In some embodiments, the antisense strand comprises at least 15 contiguous nucleotides differing by no more than three nucleotides from any one of the antisense strand nucleotide sequences of a duplex selected from the group consisting of AD-1286365.1, AD-1286369.1, AD-1286370.1, AD-1286371.1, AD-1286372.1, AD-1286373.1, AD-1286829.1, AD-1287272.1, AD-1287273.1, AD-1287274.1, and AD-1288171.1.

[0018] In some embodiments, the antisense strand comprises at least 15 contiguous nucleotides differing by no more than 3 nucleotides from the nucleotide sequence of nucleotides 2224-2246 of SEQ ID NO:6, and the antisense strand comprises at least 15 contiguous nucleotides from the corresponding nucleotide sequence of SEQ ID NO:21.

[0019] In some embodiments, the antisense strand comprises at least 15 contiguous nucleotides differing by no more than three nucleotides from the antisense strand nucleotide sequence of duplex AD-1287273.1.

[0020] In some embodiments, the antisense strand comprises at least 15 contiguous nucleotides differing by no more than 3 nucleotides from the nucleotide sequence of nucleotides 1211-1233 of SEQ ID NO:6, and the antisense strand comprises at least 15 contiguous nucleotides from the corresponding nucleotide sequence of SEQ ID NO:21.

[0021] In some embodiments, the antisense strand comprises at least 15 contiguous nucleotides differing by no more than three nucleotides from the antisense strand nucleotide sequence of duplex AD-1286372.1.

[0022] In one embodiment, both the sense strand and the antisense strand is conjugated to one or more lipophilic moieties.

[0023] In one embodiment, lipophilicity of the lipophilic moiety, measured by log Kow, exceeds 0.

[0024] In one embodiment, the hydrophobicity of the double-stranded RNAi agent, measured by the unbound fraction in a plasma protein binding assay of the double-stranded RNAi agent, exceeds 0.2.

[0025] In one embodiment, the plasma protein binding assay is an electrophoretic mobility shift assay using human serum albumin protein.

[0026] In one embodiment, the dsRNA agent comprises at least one modified nucleotide.

[0027] In some embodiments, substantially all of the nucleotides of the antisense strand are modified nucleotides.

[0028] In another embodiment, all of the nucleotides of the sense strand and all of the nucleotides of the antisense strand comprise a modification.

[0029] In one embodiment, at least one of the modified nucleotides is selected from the group a deoxy-nucleotide, a 3′-terminal deoxythimidine (dT) nucleotide, a 2′-O-methyl modified nucleotide, a 2′-fluoro modified nucleotide, a 2′-deoxy-modified nucleotide, a locked nucleotide, an unlocked nucleotide, a conformationally restricted nucleotide, a constrained ethyl nucleotide, an abasic nucleotide, a 2′-amino-modified nucleotide, a 2′-O-allyl-modified nucleotide, 2′-C-alkyl-modified nucleotide, a 2′-hydroxyl-modified nucleotide, a 2′-methoxyethyl modified nucleotide, a 2′-O-alkyl-modified nucleotide, a morpholino nucleotide, a phosphoramidate, a non-natural base comprising nucleotide, a tetrahydropyran modified nucleotide, a 1,5-anhydrohexitol modified nucleotide, a cyclohexenyl modified nucleotide, a nucleotide comprising a 5′-phosphorothioate group, a nucleotide comprising a 5′-methylphosphonate group, a nucleotide comprising a 5′ phosphate or 5′ phosphate mimic, a nucleotide comprising vinyl phosphonate, a nucleotide comprising adenosine-glycol nucleic acid (GNA), a nucleotide comprising thymidine-glycol nucleic acid (GNA)S-Isomer, a nucleotide comprising 2-hydroxymethyl-tetrahydrofurane-5-phosphate, a nucleotide comprising 2′-deoxythymidine-3′phosphate, a nucleotide comprising 2′-deoxyguanosine-3′-phosphate, a 2′-O hexadecyl nucleotide, a nucleotide comprising a 2′-phosphate, a cytidine-2′-phosphate nucleotide, a guanosine-2′-phosphate nucleotide, a 2′-O-hexadecyl-cytidine-3′-phosphate nucleotide, a 2′-O-hexadecyl-adenosine-3′-phosphate nucleotide, a 2′-O-hexadecyl-guanosine-3′-phosphate nucleotide, a 2′-O-hexadecyl-uridine-3′-phosphate nucleotide, a a 5′-vinyl phosphonate (VP), a 2′-deoxyadenosine-3′-phosphate nucleotide, a 2′-deoxycytidine-3′-phosphate nucleotide, a 2′-deoxyguanosine-3′-phosphate nucleotide, a 2′-deoxythymidine-3′-phosphate nucleotide, a 2′-deoxyuridine nucleotide, and a terminal nucleotide linked to a cholesteryl derivative and a dodecanoic acid bisdecylamide group; and combinations thereof.

[0030] In another embodiment, modified nucleotide is selected from the group consisting of a 2′-deoxy-2′-fluoro modified nucleotide, a 2′-deoxy-modified nucleotide, 3′-terminal deoxythimidine nucleotides (dT), a locked nucleotide, an abasic nucleotide, a 2′-amino-modified nucleotide, a 2′-alkyl-modified nucleotide, a 2′-O-methyl modified nucleotide, a nucleotide comprising glycol nucleic acid (GNA), a morpholino nucleotide, a phosphoramidate, and a non-natural base comprising nucleotide.

[0031] In another embodiment, the modified nucleotide comprises a short sequence of 3′-terminal deoxythimidine nucleotides (dT).

[0032] In yet another embodiment, the modifications on the nucleotides are 2′-O-methyl modifications, 2′-deoxy-modifications, 2′fluoro modifications, 5′-vinyl phosphonate (VP) modification, and 2′-0 hexadecyl nucleotide modifications.

[0033] In certain embodiments, the double stranded RNAi agent does not include an inverted abasic nucleotide.

[0034] In one embodiment, the dsRNA agent further comprises at least one phosphorothioate internucleotide linkage.

[0035] In one embodiment, the dsRNA agent comprises 6-8 phosphorothioate internucleotide linkages.

[0036] In one embodiment, each strand is no more than 30 nucleotides in length.

[0037] In one embodiment, at least one strand comprises a 3′ overhang of at least 1 nucleotide.

[0038] In another embodiment, at least one strand comprises a 3′ overhang of at least 2 nucleotides.

[0039] The double stranded region may be 15-30 nucleotide pairs in length; 17-23 nucleotide pairs in length; 17-25 nucleotide pairs in length; 23-27 nucleotide pairs in length; 19-21 nucleotide pairs in length; or 21-23 nucleotide pairs in length.

[0040] Each strand of the dsRNA agent may be 15-30, 17-20, 19-30 nucleotides in length; 19-23 nucleotides in length; or 21-23 nucleotides in length, e.g., 15, 16, 17, 18, 19, 20, 21, 22, 23, 24, 25, 26, 27, 28, 29, or 30 nucleotides in length.

[0041] In certain embodiments, the double stranded RNAi agent further includes a lipophilic ligand, e.g., a C16 ligand, conjugated to the 3′ end of the sense strand through a monovalent or branched bivalent or trivalent linker.

[0042] In one embodiment, the ligand is conjugated at the 2′-position of a nucleotide or modified nucleotide within the sense or antisense strand. For example, a C16 ligand may be conjugated as shown in the following structure:

[chemical structure]

where * denotes a bond to an adjacent nucleotide, and B is a nucleobase or a nucleobase analog, optionally where B is adenine, guanine, cytosine, thymine or uracil.

[0043] In other embodiments, the agent further comprises a targeting ligand that targets a liver tissue, e.g., one or more GalNAc derivatives, conjugated to the double stranded RNAi agent via a linker or carrier.

[0044] In yet other embodiments, the agents further comprise a lipophilic ligand, e.g., a C16 ligand, conjugated to the 3′ end of the sense strand through a monovalent or branched bivalent or trivalent linker and a targeting ligand that targets a liver tissue, e.g., one or more GalNAc derivatives conjugated to the 3′ end of the sense strand through a monovalent or branched bivalent or trivalent linker.

[0045] In one embodiment, one or more lipophilic moieties are conjugated to one or more internal positions on at least one strand.

[0046] In one embodiment, the one or more lipophilic moieties are conjugated to one or more internal positions on at least one strand via a linker or carrier.

[0047] In certain embodiments, the lipophilic moiety is not a cholesterol moiety.

[0048] In certain embodiments, the agent further comprises a targeting ligand that targets a liver tissue, e.g., one or more GalNAc derivatives, optionally conjugated to the double stranded RNAi agent via a linker or carrier.

[0049] In yet other embodiments, the agents further comprise one or more lipophilic moieties conjugated to one or more internal nucleotide positions, optionally via a linker or carrier and a targeting ligand that targets a liver tissue, e.g., one or more GalNAc derivatives, optionally conjugated to the double stranded RNAi agent via a linker or carrier.

[0050] In one embodiment, the internal positions include all positions except the terminal two positions from each end of the at least one strand.

[0051] In another embodiment, the internal positions include all positions except the terminal three positions from each end of the at least one strand.

[0052] In another embodiment, the internal positions exclude a cleavage site region of the sense strand.

[0053] In yet another embodiment, the internal positions include all positions except positions 9-12, counting from the 5′-end of the sense strand. In certain embodiments, the sense strand is 21 nucleotides in length.

[0054] In one embodiment, the internal positions include all positions except positions 11-13, counting from the 3′-end of the sense strand. Optionally, the internal positions exclude the cleavage site region of the antisense strand. In certain embodiments, the sense strand is 21 nucleotides in length.

[0055] In one embodiment, the internal positions exclude a cleavage site region of the antisense strand.

[0056] In one embodiment, the internal positions include all positions except positions 12-14, counting from the 5′-end of the antisense strand. In certain embodiments, the antisense strand is 23 nucleotides in length.

[0057] In one embodiment, the internal positions include all positions except positions 11-13 on the sense strand, counting from the 3′-end, and positions 12-14 on the antisense strand, counting from the 5′-end. In certain embodiments, the sense strand is 21 nucleotides in length and the antisense strand is 23 nucleotides in length.

[0058] In one embodiment, the one or more lipophilic moieties are conjugated to one or more of the internal positions selected from the group consisting of positions 4-8 and 13-18 on the sense strand, and positions 6-10 and 15-18 on the antisense strand, counting from the 5′end of each strand.

[0059] In one embodiment, the one or more lipophilic moieties are conjugated to one or more of the internal positions selected from the group consisting of positions 5, 6, 7, 15, and 17 on the sense strand, and positions 15 and 17 on the antisense strand, counting from the 5′-end of each strand. In certain embodiments, the sense strand is 21 nucleotides in length and the antisense strand is 23 nucleotides in length.

[0060] In one embodiment, the positions in the double stranded region exclude a cleavage site region of the sense strand.

[0061] In one embodiment, the sense strand is 21 nucleotides in length, the antisense strand is 23 nucleotides in length, and the lipophilic moiety is conjugated to position 21, position 20, position 15, position 1, position 7, position 6, or position 2 of the sense strand or position 16 of the antisense strand.

[0062] In one embodiment, the lipophilic moiety is conjugated to position 21, position 20, position 15, position 1, or position 7 of the sense strand.

[0063] In one embodiment, the lipophilic moiety is conjugated to position 21, position 20, or position 15 of the sense strand.

[0064] In one embodiment, the lipophilic moiety is conjugated to position 20 or position 15 of the sense strand.

[0065] In one embodiment, the lipophilic moiety is conjugated to position 16 of the antisense strand.

[0066] In one embodiment, the lipophilic moiety is an aliphatic, alicyclic, or polyalicyclic compound.

[0067] In one embodiment, the lipophilic moiety is selected from the group consisting of lipid, cholesterol, retinoic acid, cholic acid, adamantane acetic acid, 1-pyrene butyric acid, dihydrotestosterone, 1,3-bis-O(hexadecyl)glycerol, geranyloxyhexyanol, hexadecylglycerol, borneol, menthol, 1,3-propanediol, heptadecyl group, palmitic acid, myristic acid, O3-(oleoyl)lithocholic acid, O3-(oleoyl)cholenic acid, dimethoxytrityl, or phenoxazine. In certain embodiments, the lipophilic moiety is not cholesterol.

[0068] In one embodiment, the lipophilic moiety contains a saturated or unsaturated C4-C30 hydrocarbon chain, and an optional functional group selected from the group consisting of hydroxyl, amine, carboxylic acid, sulfonate, phosphate, thiol, azide, and alkyne.

[0069] In one embodiment, the lipophilic moiety contains a saturated or unsaturated C6-C18 hydrocarbon chain.

[0070] In one embodiment, the lipophilic moiety contains a saturated or unsaturated C16 hydrocarbon chain.

[0071] In one embodiment, the saturated or unsaturated C16 hydrocarbon chain is conjugated to position 6, counting from the 5′-end of the strand.

[0072] In one embodiment, the lipophilic moiety is conjugated via a carrier that replaces one or more nucleotide(s) in the internal position(s) or the double stranded region.

[0073] In one embodiment, the carrier is a cyclic group selected from the group consisting of pyrrolidinyl, pyrazolinyl, pyrazolidinyl, imidazolinyl, imidazolidinyl, piperidinyl, piperazinyl, [1,3]dioxolanyl, oxazolidinyl, isoxazolidinyl, morpholinyl, thiazolidinyl, isothiazolidinyl, quinoxalinyl, pyridazinonyl, tetrahydrofuranyl, and decalinyl; or is an acyclic moiety based on a serinol backbone or a diethanolamine backbone.

[0074] In one embodiment, the lipophilic moiety is conjugated to the double-stranded iRNA agent via a linker containing an ether, thioether, urea, carbonate, amine, amide, maleimide-thioether, disulfide, phosphodiester, sulfonamide linkage, a product of a click reaction, or carbamate.

[0075] In one embodiment, the lipophilic moiety is conjugated to a nucleobase, sugar moiety, or internucleosidic linkage.

[0076] In one embodiment, the double-stranded RNAi agent further includes a phosphate or phosphate mimic at the 5′-end of the antisense strand. Optionally, the phosphate mimic is a 5′-vinyl phosphonate (VP). When the phosphate mimic is a 5′-vinyl phosphonate (VP), the 5′-terminal nucleotide can have the following structure,

[chemical structure]

[0077] wherein * indicates the location of the bond to 5′-position of the adjacent nucleotide; R is hydrogen, hydroxy, methoxy, fluoro, or another 2′-modification described herein (e.g., hydroxy or methoxy); and B is a nucleobase or a modified nucleobase, optionally where B is adenine, guanine, cytosine, thymine or uracil.

[0078] In certain embodiments, the RNAi agent does not include an inverted abasic nucleotide.

[0079] In certain embodiments, the double-stranded RNAi agent does not include a targeting ligand.

[0080] In certain embodiments, the double-stranded RNAi agent further includes a targeting ligand that targets a receptor which mediates delivery to a liver tissue, e.g., a lipophilic ligand. In certain embodiments, the targeting ligand is a C16 ligand. In certain embodiments, the lipophilic ligand is not a cholesterol moiety.

[0081] In one embodiment, the lipophilic moiety or a targeting ligand is conjugated via a biocleavable linker selected from the group consisting of DNA, RNA, disulfide, amide, functionalized monosaccharides or oligosaccharides of galactosamine, glucosamine, glucose, galactose, mannose, and combinations thereof.

[0082] In one embodiment, the 3′ end of the sense strand is protected via an end cap which is a cyclic group having an amine, said cyclic group being selected from the group consisting of pyrrolidinyl, pyrazolinyl, pyrazolidinyl, imidazolinyl, imidazolidinyl, piperidinyl, piperazinyl, [1,3]dioxolanyl, oxazolidinyl, isoxazolidinyl, morpholinyl, thiazolidinyl, isothiazolidinyl, quinoxalinyl, pyridazinonyl, tetrahydrofuranyl, and decalinyl.

[0083] In one embodiment, the dsRNA agent further comprises a targeting ligand that targets a liver tissue.

[0084] In one embodiment, the targeting ligand is a GalNAc conjugate.

[0085] In one embodiment, the dsRNA agent further comprises a terminal, chiral modification occurring at the first internucleotide linkage at the 3′ end of the antisense strand, having the linkage phosphorus atom in Sp configuration, a terminal, chiral modification occurring at the first internucleotide linkage at the 5′ end of the antisense strand, having the linkage phosphorus atom in Rp configuration, and a terminal, chiral modification occurring at the first internucleotide linkage at the 5′ end of the sense strand, having the linkage phosphorus atom in either Rp configuration or Sp configuration.

[0086] In one embodiment, the dsRNA agent further comprises a terminal, chiral modification occurring at the first and second internucleotide linkages at the 3′ end of the antisense strand, having the linkage phosphorus atom in Sp configuration, a terminal, chiral modification occurring at the first internucleotide linkage at the 5′ end of the antisense strand, having the linkage phosphorus atom in Rp configuration, and a terminal, chiral modification occurring at the first internucleotide linkage at the 5′ end of the sense strand, having the linkage phosphorus atom in either Rp or Sp configuration.

[0087] In one embodiment, the dsRNA agent further comprises a terminal, chiral modification occurring at the first, second and third internucleotide linkages at the 3′ end of the antisense strand, having the linkage phosphorus atom in Sp configuration, a terminal, chiral modification occurring at the first internucleotide linkage at the 5′ end of the antisense strand, having the linkage phosphorus atom in Rp configuration, and a terminal, chiral modification occurring at the first internucleotide linkage at the 5′ end of the sense strand, having the linkage phosphorus atom in either Rp or Sp configuration.

[0088] In one embodiment, the dsRNA agent further comprises a terminal, chiral modification occurring at the first, and second internucleotide linkages at the 3′ end of the antisense strand, having the linkage phosphorus atom in Sp configuration, a terminal, chiral modification occurring at the third internucleotide linkages at the 3′ end of the antisense strand, having the linkage phosphorus atom in Rp configuration, a terminal, chiral modification occurring at the first internucleotide linkage at the 5′ end of the antisense strand, having the linkage phosphorus atom in Rp configuration, and a terminal, chiral modification occurring at the first internucleotide linkage at the 5′ end of the sense strand, having the linkage phosphorus atom in either Rp or Sp configuration.

[0089] In one embodiment, the dsRNA agent further comprises a terminal, chiral modification occurring at the first, and second internucleotide linkages at the 3′ end of the antisense strand, having the linkage phosphorus atom in Sp configuration, a terminal, chiral modification occurring at the first, and second internucleotide linkages at the 5′ end of the antisense strand, having the linkage phosphorus atom in Rp configuration, and a terminal, chiral modification occurring at the first internucleotide linkage at the 5′ end of the sense strand, having the linkage phosphorus atom in either Rp or Sp configuration.

[0090] In one embodiment, the dsRNA agent further comprises a phosphate or phosphate mimic at the 5′-end of the antisense strand.

[0091] In one embodiment, the phosphate mimic is a 5′-vinyl phosphonate (VP).

[0092] In one embodiment, the base pair at the 1 position of the 5′-end of the antisense strand of the duplex is an AU base pair.

[0093] In one embodiment, the sense strand has a total of 21 nucleotides and the antisense strand has a total of 23 nucleotides.

[0094] The present invention further provides cells, pharmaceutical compositions for inhibiting expression of a DPP4 gene, and pharmaceutical composition comprising a lipid formulation. comprising the dsRNA agent of the invention.

[0095] In one aspect, the present invention provides a method of inhibiting expression of a DPP4 gene in a cell. The method includes contacting the cell with the dsRNA agent of the invention, or the pharmaceutical composition of the invention; and maintaining the cell produced in step (a) for a time sufficient to obtain degradation of the mRNA transcript of a DPP4 gene, thereby inhibiting expression of the DPP4 gene in the cell.

[0096] In one embodiment, the cell is within a subject.

[0097] In one embodiment, the subject is a human.

[0098] In one embodiment, the expression of the DPP4 gene is inhibited by at least 50%.

[0099] In one aspect, the present invention provides a method of treating a subject having a DPP4-associated disorder, e.g., a subject having a metabolic disease, e.g., diabetes (type I or type II diabetes) or a lipid metabolism disorder, or a subject at risk of developing a metabolic disease, e.g., diabetes or a lipid metabolism disorder. The method includes administering to the subject a therapeutically effective amount of the dsRNA agent of the invention, or the pharmaceutical composition of the invention, thereby treating the subject.

[0100] In one embodiment, the subject is a human.

[0101] In one embodiment, treating comprises amelioration of at least on sign or symptom of the disease. In some embodiments, administration of the dsRNA agent results in a reduction in the blood glucose level of the subject. In other embodiments, administration of the dsRNA agent results in a reduction in the blood lipid level of the subject.

[0102] In one embodiment, the dsRNA agent is administered to the subject at a dose of about 0.01 mg/kg to about 50 mg/kg.

[0103] In some embodiments, the double stranded RNAi agent is administered to the subject orally.

[0104] In some embodiments, the double stranded RNAi agent is administered to the subject subcutaneously.

[0105] In one embodiment, the double-stranded RNAi agent is administered by intravenously.

[0106] In one embodiment, the double-stranded RNAi agent is administered to the subject by pulmonary system administration.

[0107] In some embodiments, the double stranded RNAi agent is administered to the subject intranasally, intratracheally, or by inhalation through the mouth. Certain devices are designed for delivery simultaneously through the mouth and nose. In some embodiments, the RNAi agent is administered to promote deposition substantially in the nasal cavity. In some embodiments, the RNAi agent is administered to promote deposition substantially in the lungs. In some embodiments, the RNAi agent is administered to promote deposition in the mouth or throat. In some embodiments, the RNAi agent is administered to promote deposition in both the nasal cavity and the lungs.

[0108] In certain embodiments, the RNAi agent is taken up in one or more tissues or cell types in the respiratory system including, but not limited to, bronchus, bronchiole, alveoli, epithelium including nasal and respiratory epithelium, ciliated epitheilium, and goblet cells; pneumocytes, both type I and type II, macrophages, peritubular interstitium, macrophages, adipose tissue, e.g., mediastinal adipose tissue, pulmonary neuronal cells, e.g., in the pulmonary neuroal plexus, club cells, clara cells, neutrophils, both resident and transient, and oral mucosa.

[0109] In certain embodiments, the RNAi agent is further taken up by one or more tissue or cell types, e.g., liver, kidney.

[0110] In one embodiment, the method further comprises administering to the subject an additional agent or a therapy suitable for treatment or prevention of a DPP4-associated disorder.

[0111] In one embodiment, the additional therapeutic agent is selected from the group consisting of a diabetes mellitus-treating agent, a diabetic complication-treating agent, a cardiovascular diseases-treating agent, an anti-hyperlipemia agent, a hypotensive or antihypertensive agent, an anti-obesity agent, a nonalcoholic steatohepatitis (NASH)-treating agent, a chemotherapeutic agent, an immunotherapeutic agent, an immunosuppressive agent, an anti-inflammatory agent, an anti-steatosis agent, an anti-fibrosis agent, an immune modulator, a tyrosine kinase inhibitor, an antifibrotic agent, and a combination of any of the foregoing.

[0112] In another aspect, the present invention provides an RNA-induced silencing complex (RISC) comprising an antisense strand of any of the dsRNA agents of the present invention.

[0113] The present invention is further illustrated by the following detailed description.

### BRIEF DESCRIPTION OF THE DRAWINGS

[0114] FIG. 1 is a graph showing mouse DPP4 mRNA levels in mice (n=3 per group) subcutaneously administered a single 10 mg/kg dose of the indicated dsRNA duplexes on day 16 post-dose. Mouse DPP4 mRNA levels are shown relative to control levels detected with PBS treatment.

[0115] FIG. 2 is a graph showing the effect of AD-1287273 administration on insulin sensitivity in high fat diet fed mice.

[0116] FIG. 3 is a graph showing the effect of AD-1286372 administration on insulin tolerance in high fat diet fed mice.

[0117] FIG. 4 is a graph showing the effect of AD-1286372 knockdown on circulating DPP4 protein levels in high fat diet fed mice

### DETAILED DESCRIPTION OF THE INVENTION

[0118] The present invention provides iRNA compositions which effect the RNA-induced silencing complex (RISC)-mediated cleavage of RNA transcripts of a DPP4 gene. The DPP4 gene may be within a cell, e.g., a cell within a subject, such as a human. The use of these iRNAs enables the targeted degradation of mRNAs of the corresponding gene (a DPP4 gene) in mammals. The present disclosure also provides methods of using the RNAi compositions of the disclosure for inhibiting the expression of a DPP4 gene for treating a subject having a disorder that would benefit from inhibiting or reducing the expression of a DPP4 gene, e.g., a DPP4-associated disorder, e.g., a metabolic disease, e.g., a subject having diabetes or a lipid metabolism disorder, or a subject at risk of a metabolic disease, e.g., diabetes or a lipid metabolism disorder.

[0119] The iRNAs of the invention include an RNA strand (the antisense strand) having a region which is up to about 30 nucleotides or less in length, e.g., 15-30, 15-29, 15-28, 15-27, 15-26, 15-25, 15-24, 15-23, 15-22, 15-21, 15-20, 15-19, 15-18, 15-17, 18-30, 18-29, 18-28, 18-27, 18-26, 18-25, 18-24, 18-23, 18-22, 18-21, 18-20, 19-30, 19-29, 19-28, 19-27, 19-26, 19-25, 19-24, 19-23, 19-22, 19-21, 19-20, 20-30, 20-29, 20-28, 20-27, 20-26, 20-25, 20-24,20-23, 20-22, 20-21, 21-30, 21-29, 21-28, 21-27, 21-26, 21-25, 21-24, 21-23, or 21-22 nucleotides in length, which region is substantially complementary to at least part of an mRNA transcript of a DPP4 gene. In certain embodiments, the RNAi agents of the disclosure include an RNA strand (the antisense strand) having a region which is about 21-23 nucleotides in length, which region is substantially complementary to at least part of an mRNA transcript of a DPP4 gene.

[0120] In certain embodiments, one or both of the strands of the double stranded RNAi agents of the invention is up to 66 nucleotides in length, e.g., 36-66, 26-36, 25-36, 31-60, 22-43, 27-53 nucleotides in length, with a region of at least 19 contiguous nucleotides that is substantially complementary to at least a part of an mRNA of a DPP4 gene. In some embodiments, such iRNA agents having longer length antisense strands can, for example, include a second RNA strand (the sense strand) of 20-60 nucleotides in length wherein the sense and antisense strands form a duplex of 18-30 contiguous nucleotides.

[0121] The use of iRNAs of the invention enables the targeted degradation of the DPP4 mRNAs in mammals. Thus, methods and compositions including these iRNAs are useful for treating a subject having a DPP4-associated disorder, e.g., a metabolism disease, e.g., diabetes or a lipid disorder, or for treating a subject at risk of developing a metabolism disease, e.g., diabetes or a lipid disorder.

[0122] The following detailed description discloses how to make and use compositions containing iRNAs to inhibit the expression of a DPP4 gene s as well as compositions, uses, and methods for treating subjects that would benefit from inhibition and/or reduction of the expression of a DPP4 gene, e.g., subjects susceptible to or diagnosed with a DPP4-associated disorder.

### I. Definitions

[0123] In order that the present invention may be more readily understood, certain terms are first defined. In addition, it should be noted that whenever a value or range of values of a parameter are recited, it is intended that values and ranges intermediate to the recited values are also intended to be part of this invention.

[0124] The articles “a” and “an” are used herein to refer to one or to more than one (i.e., to at least one) of the grammatical object of the article. By way of example, “an element” means one element or more than one element, e.g., a plurality of elements.

[0125] The term “including” is used herein to mean, and is used interchangeably with, the phrase “including but not limited to”.

[0126] The term “or” is used herein to mean, and is used interchangeably with, the term “and/or,” unless context clearly indicates otherwise.

[0127] The term “about” is used herein to mean within the typical ranges of tolerances in the art. For example, “about” can be understood as about 2 standard deviations from the mean. In certain embodiments, about means±10%. In certain embodiments, about means±5%. When about is present before a series of numbers or a range, it is understood that “about” can modify each of the numbers in the series or range.

[0128] The term “at least”, “no less than” or “or more” prior to a number or series of numbers is understood to include the number adjacent to the term “at least”, and all subsequent numbers or integers that could logically be included, as clear from context. For example, the number of nucleotides in a nucleic acid molecule must be an integer. For example, “at least 18 nucleotides of a 21 nucleotide nucleic acid molecule” means that 18, 19, 20, or 21 nucleotides have the indicated property. When at least is present before a series of numbers or a range, it is understood that “at least” can modify each of the numbers in the series or range.

[0129] As used herein, “no more than” or “or less” is understood as the value adjacent to the phrase and logical lower values or integers, as logical from context, to zero. For example, a duplex with an overhang of “no more than 2 nucleotides” has a 2, 1, or 0 nucleotide overhang. When “no more than” is present before a series of numbers or a range, it is understood that “no more than” can modify each of the numbers in the series or range. As used herein, ranges include both the upper and lower limit.

[0130] As used herein, methods of detection can include determination that the amount of analyte present is below the level of detection of the method.

[0131] In the event of a conflict between an indicated target site and the nucleotide sequence for a sense or antisense strand, the indicated sequence takes precedence.

[0132] In the event of a conflict between a sequence and its indicated site on a transcript or other sequence, the nucleotide sequence recited in the specification takes precedence.

[0133] As used herein, the term “Dipeptidyl peptidase 4” (“DPP4”) refers to the well-known gene and polypeptide, also known in the art as Adenosine Deaminase Complexing Protein, Dipeptidylpeptidase IV (CD26, Adenosine Deaminase Complexing Protein 2), T-Cell Activation Antigen CD26 Dipeptidyl Peptidase IV, Post-Proline Dipeptidyl Aminopeptidase IV, Xaa-Pro-Dipeptidylaminopeptidase, Gly-Pro Naphthylamidase, CD26 Antigen, EC 3.4.14.5, ADCP-2, DPP IV, ADABP, ADCP2, DPPIV, TP103, and CD26. DPP4 is an intrinsic type II transmembrane glycoprotein and a serine exopeptidase that cleaves X-proline dipeptides from the N-terminus of polypeptides. Dipeptidyl peptidase 4 is highly involved in glucose and insulin metabolism, as well as in immune regulation.

[0134] The term “DPP4” includes human DPP4, the amino acid and nucleotide sequences of which may be found in, for example, GenBank Accession No. NM_001935.4 (GI: 1519314476; SEQ ID NO:1); GenBank Accession No. NM_001379604.1 (GI: 1829653633; SEQ ID NO:2); GenBank Accession No. NM_001379605.1 (GI: 1829653631; SEQ ID NO:3); GenBank Accession No. NM_001379606.1 (GI: 1829653629; SEQ ID NO:4); and GenBank Accession No. XM_005246371 (SEQ ID NO: 5); mouse DPP4, the amino acid and nucleotide sequence of which may be found in, for example, GenBank Accession No. NM_010074.3 (GI: 227116290, SEQ ID NO: 6); GenBank Accession No. NM_001159543.1 (GI: 227116291, SEQ ID NO: 7); GenBank Accession No. XM_006498691 (SEQ ID NO: 8); GenBank Accession No. XM_006498692 (SEQ ID NO: 9); and GenBank Accession No. XM_011239274 (SEQ ID NO: 10); and rat DPP4, the amino acid and nucleotide sequence of which may be found in, for example, GenBank Accession No.: NM_012789.1 (GI: 6978772; SEQ ID NO: 11).

[0135] The term “DPP4” also includes Macaca mulatta DPP4, the amino acid and nucleotide sequence of which may be found in, for example, GenBank Accession No. NM_001039190.2 (GI: 589811490; SEQ ID NO:12) and Macacafascicularis DPP4, the amino acid and nucleotide sequence of which may be found in, for example, GenBank Accession No. XM_005573317.2 (GI: 982285980; SEQ ID NO:13); GenBank Accession No. XM_005573318 (SEQ ID NO: 14); and GenBank Accession No. XM_015432296 (SEQ ID NO: 15).

[0136] Additional examples of DPP4 mRNA sequences are readily available using, e.g., GenBank, UniProt, OMIM, and the Macaca genome project web site.

[0137] Exemplary DPP4 nucleotide sequences may also be found in SEQ ID NOs:1-30. SEQ ID NOs:16-30 are the reverse complement sequences of SEQ ID NOs:1-15, respectively.

[0138] Further information on DPP4 is provided, for example in the NCBI Gene database at https://www.ncbi.nlm.nih.gov/gene/1803.

[0139] The entire contents of each of the foregoing GenBank Accession numbers and the Gene database numbers are incorporated herein by reference as of the date of filing this application.

[0140] The terms “Dipeptidyl peptidase 4” and “DPP4,” as used herein, also refers to naturally occurring DNA sequence variations of the DPP4 gene. Numerous sequence variations within the DPP4 gene have been identified and may be found at, for example, NCBI dbSNP and UniProt (see, e.g., https://www.ncbi.nlm.nih.gov/snp/?term=DPP4), the entire contents of which is incorporated herein by reference as of the date of filing this application.

[0141] As used herein, “target sequence” refers to a contiguous portion of the nucleotide sequence of an mRNA molecule formed during the transcription of a DPP4 gene, including mRNA that is a product of RNA processing of a primary transcription product. In one embodment, the target portion of the sequence will be at least long enough to serve as a substrate for RNAi-directed cleavage at or near that portion of the nucleotide sequence of an mRNA molecule formed during the transcription of a DPP4 gene. In one embodiment, the target sequence is within the protein coding region of the DPP4 gene. In another embodiment, the target sequence is within the 3′ UTR of the DPP4 gene.

[0142] The target sequence may be from about 9-36 nucleotides in length, e.g., about 15-30 nucleotides in length. For example, the target sequence can be about 15-30 nucleotides, 15-29, 15-28, 15-27, 15-26, 15-25, 15-24, 15-23, 15-22, 15-21, 15-20, 15-19, 15-18, 15-17, 18-30, 18-29, 18-28, 18-27, 18-26, 18-25, 18-24, 18-23, 18-22, 18-21, 18-20, 19-30, 19-29, 19-28, 19-27, 19-26, 19-25, 19-24, 19-23, 19-22, 19-21, 19-20, 20-30, 20-29, 20-28, 20-27, 20-26, 20-25, 20-24, 20-23, 20-22, 20-21, 21-30, 21-29, 21-28, 21-27, 21-26, 21-25, 21-24, 21-23, or 21-22 nucleotides in length. In some embodiments, the target sequence is about 19 to about 30 nucleotides in length. In other embodiments, the target sequence is about 19 to about 25 nucleotides in length. In still other embodiments, the target sequence is about 19 to about 23 nucleotides in length. In some embodiments, the target sequence is about 21 to about 23 nucleotides in length. Ranges and lengths intermediate to the above recited ranges and lengths are also contemplated to be part of the invention.

[0143] As used herein, the term “strand comprising a sequence” refers to an oligonucleotide comprising a chain of nucleotides that is described by the sequence referred to using the standard nucleotide nomenclature.

[0144] “G,” “C,” “A,” “T,” and “U” each generally stand for a nucleotide that contains guanine, cytosine, adenine, thymidine, and uracil as a base, respectively. However, it will be understood that the term “ribonucleotide” or “nucleotide” can also refer to a modified nucleotide, as further detailed below, or a surrogate replacement moiety (see, e.g., Table 1). The skilled person is well aware that guanine, cytosine, adenine, and uracil can be replaced by other moieties without substantially altering the base pairing properties of an oligonucleotide comprising a nucleotide bearing such replacement moiety. It is understood that when a cDNA sequence is provided, the corresponding mRNA or RNAi agent would include a U in place of a T. For example, without limitation, a nucleotide comprising inosine as its base can base pair with nucleotides containing adenine, cytosine, or uracil. Hence, nucleotides containing uracil, guanine, or adenine can be replaced in the nucleotide sequences of dsRNA featured in the invention by a nucleotide containing, for example, inosine. In another example, adenine and cytosine anywhere in the oligonucleotide can be replaced with guanine and uracil, respectively to form G-U Wobble base pairing with the target mRNA. Sequences containing such replacement moieties are suitable for the compositions and methods featured in the invention. Further, one of skill in the art that a T is a target gene sequence, or reverse complement thereof, would often be replaced by a U in an RNAi agent of the invention.

[0145] The terms “iRNA”, “RNAi agent,” “iRNA agent,” “RNA interference agent” as used interchangeably herein, refer to an agent that contains RNA as that term is defined herein, and which mediates the targeted cleavage of an RNA transcript via an RNA-induced silencing complex (RISC) pathway. RNA interference (RNAi) is a process that directs the sequence-specific degradation of mRNA. RNAi modulates, e.g., inhibits, the expression of a DPP4 gene in a cell, e.g., a cell within a subject, such as a mammalian subject.

[0146] In one embodiment, an RNAi agent of the disclosure includes a single stranded RNAi that interacts with a target RNA sequence, e.g., a DPP4 mRNA sequence, to direct the cleavage of the target RNA. Without wishing to be bound by theory it is believed that long double stranded RNA introduced into cells is broken down into double-stranded short interfering RNAs (siRNAs) comprising a sense strand and an antisense strand by a Type III endonuclease known as Dicer (Sharp et al. (2001) Genes Dev. 15:485). Dicer, a ribonuclease-III-like enzyme, processes these dsRNA into 19-23 base pair short interfering RNAs with characteristic two base 3′ overhangs (Bernstein, et al., (2001) Nature 409:363). These siRNAs are then incorporated into an RNA-induced silencing complex (RISC) where one or more helicases unwind the siRNA duplex, enabling the complementary antisense strand to guide target recognition (Nykanen, et al., (2001) Cell 107:309). Upon binding to the appropriate target mRNA, one or more endonucleases within the RISC cleave the target to induce silencing (Elbashir, et al., (2001) Genes Dev. 15:188). Thus, in one aspect the disclosure relates to a single stranded RNA (ssRNA) (the antisense strand of a siRNA duplex) generated within a cell and which promotes the formation of a RISC complex to effect silencing of the target gene. Accordingly, the term “siRNA” is also used herein to refer to an RNAi as described above.

[0147] In another embodiment, the RNAi agent may be a single-stranded RNA that is introduced into a cell or organism to inhibit a target mRNA. Single-stranded RNAi agents bind to the RISC endonuclease, Argonaute 2, which then cleaves the target mRNA. The single-stranded siRNAs are generally 15-30 nucleotides and are chemically modified. The design and testing of single-stranded RNAs are described in U.S. Pat. No. 8,101,348 and in Lima et al., (2012) Cell 150:883-894, the entire contents of each of which are hereby incorporated herein by reference. Any of the antisense nucleotide sequences described herein may be used as a single-stranded siRNA as described herein or as chemically modified by the methods described in Lima et al., (2012) Cell 150:883-894.

[0148] In another embodiment, a “RNAi agent” for use in the compositions and methods of the disclosure is a double stranded RNA and is referred to herein as a “double stranded RNAi agent,” “double stranded RNA (dsRNA) molecule,” “dsRNA agent,” or “dsRNA”. The term “dsRNA” refers to a complex of ribonucleic acid molecules, having a duplex structure comprising two anti-parallel and substantially complementary nucleic acid strands, referred to as having “sense” and “antisense” orientations with respect to a target RNA, i.e., a DPP4 mRNA sequence. In some embodiments of the disclosure, a double stranded RNA (dsRNA) triggers the degradation of a target RNA, e.g., an mRNA, through a post-transcriptional gene-silencing mechanism referred to herein as RNA interference or RNAi.

[0149] In general, a dsRNA molecule can include ribonucleotides, but as described in detail herein, each or both strands can also include one or more non-ribonucleotides, e.g., a deoxyribonucleotide, a modified nucleotide. In addition, as used in this specification, an “RNAi agent” may include ribonucleotides with chemical modifications; an RNAi agent may include substantial modifications at multiple nucleotides.

[0150] As used herein, the term “modified nucleotide” refers to a nucleotide having, independently, a modified sugar moiety, a modified internucleotide linkage, or a modified nucleobase. Thus, the term modified nucleotide encompasses substitutions, additions or removal of, e.g., a functional group or atom, to internucleoside linkages, sugar moieties, or nucleobases. The modifications suitable for use in the agents of the disclosure include all types of modifications disclosed herein or known in the art. Any such modifications, as used in a siRNA type molecule, are encompassed by “RNAi agent” for the purposes of this specification and claims.

[0151] In certain embodiments of the instant disclosure, inclusion of a deoxy-nucleotide—which is acknowledged as a naturally occurring form of nucleotide—if present within a RNAi agent can be considered to constitute a modified nucleotide.

[0152] The duplex region may be of any length that permits specific degradation of a desired target RNA through a RISC pathway, and may range from about 9 to 36 base pairs in length, e.g., about 15-30 base pairs in length, for example, about 9, 10, 11, 12, 13, 14, 15, 16, 17, 18, 19, 20, 21, 22, 23, 24, 25, 26, 27, 28, 29, 30, 31, 32, 33, 34, 35, or 36 base pairs in length, such as about 15-30, 15-29, 15-28, 15-27, 15-26, 15-25, 15-24, 15-23, 15-22, 15-21, 15-20, 15-19, 15-18, 15-17, 18-30, 18-29, 18-28, 18-27, 18-26, 18-25, 18-24, 18-23, 18-22, 18-21, 18-20, 19-30, 19-29, 19-28, 19-27, 19-26, 19-25, 19-24, 19-23, 19-22, 19-21, 19-20, 20-30, 20-29, 20-28, 20-27, 20-26, 20-25, 20-24,20-23, 20-22, 20-21, 21-30, 21-29, 21-28, 21-27, 21-26, 21-25, 21-24, 21-23, or 21-22 base pairs in length. Ranges and lengths intermediate to the above recited ranges and lengths are also contemplated to be part of the invention.

[0153] The two strands forming the duplex structure may be different portions of one larger RNA molecule, or they may be separate RNA molecules. Where the two strands are part of one larger molecule, and therefore are connected by an uninterrupted chain of nucleotides between the 3′-end of one strand and the 5′-end of the respective other strand forming the duplex structure, the connecting RNA chain is referred to as a “hairpin loop.” A hairpin loop can comprise at least one unpaired nucleotide. In some embodiments, the hairpin loop can comprise at at least 4, at least 5, at least 6, at least 7, at least 8, at least 9, at least 10, at least 20, at least 23 or more unpaired nucleotides or nucleotides not directed to the target site of the dsRNA. In some embodiments, the hairpin loop can be 10 or fewer nucleotides. In some embodiments, the hairpin loop can be 8 or fewer unpaired nucleotides. In some embodiments, the hairpin loop can be 4-10 unpaired nucleotides. In some embodiments, the hairpin loop can be 4-8 nucleotides.

[0154] In certain embodiment, the two strands of double-stranded oligomeric compound can be linked together. The two strands can be linked to each other at both ends, or at one end only. By linking at one end is meant that 5′-end of first strand is linked to the 3′-end of the second strand or 3′-end of first strand is linked to 5′-end of the second strand. When the two strands are linked to each other at both ends, 5′-end of first strand is linked to 3′-end of second strand and 3′-end of first strand is linked to 5′-end of second strand. The two strands can be linked together by an oligonucleotide linker including, but not limited to, (N)n; wherein N is independently a modified or unmodified nucleotide and n is 3-23. In some embodiments, n is 3-10, e.g., 3, 4, 5, 6, 7, 8, 9, or 10. In some embodiments, the oligonucleotide linker is selected from the group consisting of GNRA, (G)4, (U)4, and (dT)4, wherein N is a modified or unmodified nucleotide and R is a modified or unmodified purine nucleotide. Some of the nucleotides in the linker can be involved in base-pair interactions with other nucleotides in the linker. The two strands can also be linked together by a non-nucleosidic linker, e.g. a linker described herein. It will be appreciated by one of skill in the art that any oligonucleotide chemical modifications or variations describe herein can be used in the oligonucleotide linker.

[0155] Hairpin and dumbbell type oligomeric compounds will have a duplex region equal to or at least 14, 15, 15, 16, 17, 18, 19, 29, 21, 22, 23, 24, or 25 nucleotide pairs. The duplex region can be equal to or less than 200, 100, or 50, in length. In some embodiments, ranges for the duplex region are 15-30, 17 to 23, 19 to 23, and 19 to 21 nucleotides pairs in length.

[0156] The hairpin oligomeric compounds can have a single strand overhang or terminal unpaired region, in some embodiments at the 3′, and in some embodiments on the antisense side of the hairpin. In some embodiments, the overhangs are 1-4, more generally 2-3 nucleotides in length. The hairpin oligomeric compounds that can induce RNA interference are also referred to as “shRNA” herein.

[0157] Where the two substantially complementary strands of a dsRNA are comprised by separate RNA molecules, those molecules need not, but can be covalently connected. Where the two strands are connected covalently by means other than an uninterrupted chain of nucleotides between the 3′-end of one strand and the 5′-end of the respective other strand forming the duplex structure, the connecting structure is referred to as a “linker.” The RNA strands may have the same or a different number of nucleotides. The maximum number of base pairs is the number of nucleotides in the shortest strand of the dsRNA minus any overhangs that are present in the duplex. In addition to the duplex structure, an RNAi may comprise one or more nucleotide overhangs.

[0158] In one embodiment, an RNAi agent of the invention is a dsRNA, each strand of which is 24-30 nucleotides in length, that interacts with a target RNA sequence, e.g., a DPP4 mRNA sequence, to direct the cleavage of the target RNA. Without wishing to be bound by theory, long double stranded RNA introduced into cells is broken down into siRNA by a Type III endonuclease known as Dicer (Sharp et al. (2001) Genes Dev. 15:485). Dicer, a ribonuclease-III-like enzyme, processes the dsRNA into 19-23 base pair short interfering RNAs with characteristic two base 3′ overhangs (Bernstein, et al., (2001) Nature 409:363). The siRNAs are then incorporated into an RNA-induced silencing complex (RISC) where one or more helicases unwind the siRNA duplex, enabling the complementary antisense strand to guide target recognition (Nykanen, et al., (2001) Cell 107:309). Upon binding to the appropriate target mRNA, one or more endonucleases within the RISC cleave the target to induce silencing (Elbashir, et al., (2001) Genes Dev. 15:188).

[0159] In one embodiment, an RNAi agent of the invention is a dsRNA agent, each strand of which comprises 19-23 nucleotides that interacts with a DPP4 mRNA sequence to direct the cleavage of the target RNA. Without wishing to be bound by theory, long double stranded RNA introduced into cells is broken down into siRNA by a Type III endonuclease known as Dicer (Sharp et al. (2001) Genes Dev. 15:485). Dicer, a ribonuclease-III-like enzyme, processes the dsRNA into 19-23 base pair short interfering RNAs with characteristic two base 3′ overhangs (Bernstein, et al., (2001) Nature 409:363). The siRNAs are then incorporated into an RNA-induced silencing complex (RISC) where one or more helicases unwind the siRNA duplex, enabling the complementary antisense strand to guide target recognition (Nykanen, et al., (2001) Cell 107:309). Upon binding to the appropriate target mRNA, one or more endonucleases within the RISC cleave the target to induce silencing (Elbashir, et al., (2001) Genes Dev. 15:188). In one embodiment, an RNAi agent of the invention is a dsRNA of 24-30 nucleotides that interacts with a DPP4 mRNA sequence to direct the cleavage of the target RNA.

[0160] As used herein, the term “nucleotide overhang” refers to at least one unpaired nucleotide that protrudes from the duplex structure of a RNAi agent, e.g., a dsRNA. For example, when a 3′-end of one strand of a dsRNA extends beyond the 5′-end of the other strand, or vice versa, there is a nucleotide overhang. A dsRNA can comprise an overhang of at least one nucleotide; alternatively, the overhang can comprise at least two nucleotides, at least three nucleotides, at least four nucleotides, at least five nucleotides or more. A nucleotide overhang can comprise or consist of a nucleotide/nucleoside analog, including a deoxynucleotide/nucleoside. The overhang(s) can be on the sense strand, the antisense strand or any combination thereof. Furthermore, the nucleotide(s) of an overhang can be present on the 5′-end, 3′-end or both ends of either an antisense or sense strand of a dsRNA.

[0161] In one embodiment of the dsRNA, at least one strand comprises a 3′ overhang of at least 1 nucleotide. In another embodiment, at least one strand comprises a 3′ overhang of at least 2 nucleotides, e.g., 2, 3, 4, 5, 6, 7, 9, 10, 11, 12, 13, 14, or 15 nucleotides. In other embodiments, at least one strand of the RNAi agent comprises a 5′ overhang of at least 1 nucleotide. In certain embodiments, at least one strand comprises a 5′ overhang of at least 2 nucleotides, e.g., 2, 3, 4, 5, 6, 7, 9, 10, 11, 12, 13, 14, or 15 nucleotides. In still other embodiments, both the 3′ and the 5′ end of one strand of the RNAi agent comprise an overhang of at least 1 nucleotide.

[0162] In one embodiment, the antisense strand of a dsRNA has a 1-10 nucleotide, e.g., 0-3, 1-3, 2-4, 2-5, 4-10, 5-10, e.g., a 1, 2, 3, 4, 5, 6, 7, 8, 9, or 10 nucleotide, overhang at the 3′-end or the 5′-end.

[0163] In one embodiment, the sense strand of a dsRNA has a 1-10 nucleotide, e.g., a 1, 2, 3, 4, 5, 6, 7, 8, 9, or 10 nucleotide, overhang at the 3′-end or the 5′-end. In another embodiment, one or more of the nucleotides in the overhang is replaced with a nucleoside thiophosphate.

[0164] In certain embodiments, the overhang on the sense strand or the antisense strand, or both, can include extended lengths longer than 10 nucleotides, e.g., 1-30 nucleotides, 2-30 nucleotides, 10-30 nucleotides, or 10-15 nucleotides in length. In certain embodiments, an extended overhang is on the sense strand of the duplex. In certain embodiments, an extended overhang is present on the 3′end of the sense strand of the duplex. In certain embodiments, an extended overhang is present on the 5′end of the sense strand of the duplex. In certain embodiments, an extended overhang is on the antisense strand of the duplex. In certain embodiments, an extended overhang is present on the 3′end of the antisense strand of the duplex. In certain embodiments, an extended overhang is present on the 5′end of the antisense strand of the duplex. In certain embodiments, one or more of the nucleotides in the overhang is replaced with a nucleoside thiophosphate. In certain embodiments, the overhang includes a self-complementary portion such that the overhang is capable of forming a hairpin structure that is stable under physiological conditions.

[0165] The terms “blunt” or “blunt ended” as used herein in reference to a dsRNA mean that there are no unpaired nucleotides or nucleotide analogs at a given terminal end of a dsRNA, i.e., no nucleotide overhang. One or both ends of a dsRNA can be blunt. Where both ends of a dsRNA are blunt, the dsRNA is said to be blunt ended. To be clear, a “blunt ended” dsRNA is a dsRNA that is blunt at both ends, i.e., no nucleotide overhang at either end of the molecule. Most often such a molecule will be double stranded over its entire length.

[0166] The term “antisense strand” or “guide strand” refers to the strand of an iRNA, e.g., a dsRNA, which includes a region that is substantially complementary to a target sequence, e.g., a DPP4 mRNA sequence.

[0167] As used herein, the term “region of complementarity” refers to the region on the antisense strand that is substantially complementary to a sequence, for example a target sequence, e.g., a DPP4 nucleotide sequence, as defined herein. Where the region of complementarity is not fully complementary to the target sequence, the mismatches can be in the internal or terminal regions of the molecule. Generally, the most tolerated mismatches are in the terminal regions, e.g., within 5, 4, 3, or 2 nucleotides of the 5′- or 3′-terminus of the RNAi agent.

[0168] In some embodiments, a double stranded RNA agent of the invention includes a nucleotide mismatch in the antisense strand. In some embodiments, the antisense strand of the double stranded RNA agent of the invention includes no more than 4 mismatches with the target mRNA, e.g., the antisense strand includes 4, 3, 2, 1, or 0 mismatches with the target mRNA. In some embodiments, the antisense strand double stranded RNA agent of the invention includes no more than 4 mismatches with the sense strand, e.g., the antisense strand includes 4, 3, 2, 1, or 0 mismatches with the sense strand. In some embodiments, a double stranded RNA agent of the invention includes a nucleotide mismatch in the sense strand. In some embodiments, the sense strand of the double stranded RNA agent of the invention includes no more than 4 mismatches with the antisense strand, e.g., the sense strand includes 4, 3, 2, 1, or 0 mismatches with the antisense strand. In some embodiments, the nucleotide mismatch is, for example, within 5, 4, 3 nucleotides from the 3′-end of the iRNA. In another embodiment, the nucleotide mismatch is, for example, in the 3′-terminal nucleotide of the iRNA agent. In some embodiments, the mismatch(s) is not in the seed region.

[0169] Thus, an RNAi agent as described herein can contain one or more mismatches to the target sequence. In one embodiment, a RNAi agent as described herein contains no more than 3 mismatches (i.e., 3, 2, 1, or 0 mismatches). In one embodiment, an RNAi agent as described herein contains no more than 2 mismatches. In one embodiment, an RNAi agent as described herein contains no more than 1 mismatch. In one embodiment, an RNAi agent as described herein contains 0 mismatches. In certain embodiments, if the antisense strand of the RNAi agent contains mismatches to the target sequence, the mismatch can optionally be restricted to be within the last 5 nucleotides from either the 5′- or 3′-end of the region of complementarity. For example, in such embodiments, for a 23 nucleotide RNAi agent, the strand which is complementary to a region of a DPP4 gene, generally does not contain any mismatch within the central 13 nucleotides. The methods described herein or methods known in the art can be used to determine whether an RNAi agent containing a mismatch to a target sequence is effective in inhibiting the expression of a DPP4 gene. Consideration of the efficacy of RNAi agents with mismatches in inhibiting expression of a DPP4 gene is important, especially if the particular region of complementarity in a DPP4 gene is known to vary.

[0170] The term “sense strand” or “passenger strand” as used herein, refers to the strand of a RNAi agent that includes a region that is substantially complementary to a region of the antisense strand as that term is defined herein.

[0171] As used herein, “substantially all of the nucleotides are modified” are largely but not wholly modified and can include not more than 5, 4, 3, 2, or 1 unmodified nucleotides.

[0172] As used herein, the term “cleavage region” refers to a region that is located immediately adjacent to the cleavage site. The cleavage site is the site on the target at which cleavage occurs. In some embodiments, the cleavage region comprises three bases on either end of, and immediately adjacent to, the cleavage site. In some embodiments, the cleavage region comprises two bases on either end of, and immediately adjacent to, the cleavage site. In some embodiments, the cleavage site specifically occurs at the site bound by nucleotides 10 and 11 of the antisense strand, and the cleavage region comprises nucleotides 11, 12 and 13.

[0173] As used herein, and unless otherwise indicated, the term “complementary,” when used to describe a first nucleotide sequence in relation to a second nucleotide sequence, refers to the ability of an oligonucleotide or polynucleotide comprising the first nucleotide sequence to hybridize and form a duplex structure under certain conditions with an oligonucleotide or polynucleotide comprising the second nucleotide sequence, as will be understood by the skilled person. Such conditions can be, for example, “stringent conditions”, where stringent conditions can include: 400 mM NaCl, 40 mM PIPES pH 6.4, 1 mM EDTA, 50° C. or 70° C. for 12-16 hours followed by washing (see, e.g., “Molecular Cloning: A Laboratory Manual, Sambrook, et al. (1989) Cold Spring Harbor Laboratory Press). Other conditions, such as physiologically relevant conditions as can be encountered inside an organism, can apply. The skilled person will be able to determine the set of conditions most appropriate for a test of complementarity of two sequences in accordance with the ultimate application of the hybridized nucleotides.

[0174] Complementary sequences within a RNAi agent, e.g., within a dsRNA as described herein, include base-pairing of the oligonucleotide or polynucleotide comprising a first nucleotide sequence to an oligonucleotide or polynucleotide comprising a second nucleotide sequence over the entire length of one or both nucleotide sequences. Such sequences can be referred to as “fully complementary” with respect to each other herein. However, where a first sequence is referred to as “substantially complementary” with respect to a second sequence herein, the two sequences can be fully complementary, or they can form one or more, but generally not more than 5, 4, 3, or 2 mismatched base pairs upon hybridization for a duplex up to 30 base pairs, while retaining the ability to hybridize under the conditions most relevant to their ultimate application, e.g., inhibition of gene expression, in vitro or in vivo. However, where two oligonucleotides are designed to form, upon hybridization, one or more single stranded overhangs, such overhangs shall not be regarded as mismatches with regard to the determination of complementarity. For example, a dsRNA comprising one oligonucleotide 21 nucleotides in length and another oligonucleotide 23 nucleotides in length, wherein the longer oligonucleotide comprises a sequence of 21 nucleotides that is fully complementary to the shorter oligonucleotide, can yet be referred to as “fully complementary” for the purposes described herein.

[0175] “Complementary” sequences, as used herein, can also include, or be formed entirely from, non-Watson-Crick base pairs or base pairs formed from non-natural and modified nucleotides, in so far as the above requirements with respect to their ability to hybridize are fulfilled. Such non-Watson-Crick base pairs include, but are not limited to, G:U Wobble or Hoogsteen base pairing.

[0176] The terms “complementary,” “fully complementary” and “substantially complementary” herein can be used with respect to the base matching between the sense strand and the antisense strand of a dsRNA, or between two oligonucleotides or polynucleotides, such as the antisense strand of a RNAi agent and a target sequence, as will be understood from the context of their use.

[0177] As used herein, a polynucleotide that is “substantially complementary to at least part of” a messenger RNA (mRNA) or target sequence refers to a polynucleotide that is substantially complementary to a contiguous portion of the mRNA of interest or target sequence (e.g., an mRNA encoding DPP4). For example, a polynucleotide is complementary to at least a part of a DPP4 RNA if the sequence is substantially complementary to a non-interrupted portion of an mRNA encoding DPP4.

[0178] Accordingly, in some embodiments, the antisense strand polynucleotides disclosed herein are fully complementary to the target DPP4 sequence.

[0179] In other embodiments, the antisense strand polynucleotides disclosed herein are substantially complementary to the target DPP4 sequence and comprise a contiguous nucleotide sequence which is at least about 80% complementary over its entire length to the equivalent region of the nucleotide sequence of SEQ ID NOs: 1-15 for DPP4, or a fragment of SEQ ID NOs: 1-15, such as about 85%, 86%, 87%, 88%, 89%, 90%, 91%, 92%, 93%, 94%, 95%, 96%, 97%, 98%, or about 99% complementary.

[0180] In other embodiments, the antisense polynucleotides disclosed herein are substantially complementary to the target DPP4 sequence and comprise a contiguous nucleotide sequence which is at least about 80% complementary over its entire length to any one of the sense strand nucleotide sequences in any one of Tables 2-3 and 5-6, or a fragment of any one of the sense strand nucleotide sequences in any one of Tables 2-3 and 5-6, such as about 85%, 86%, 87%, 88%, 89%, 90%, 91%, 92%, 93%, 94%, 95%, 96%, 97%, 98%, or about 99% complementary.

[0181] In some embodiments, the antisense polynucleotides disclosed herein are substantially complementary to the target DPP4 sequence and comprise a contiguous nucleotide sequence which is at least about 80% complementary over its entire length to a fragment of SEQ ID NO: 6 selected from the group of nucleotides 1204-1226, 1208-1230, 1209-1231, 1210-1232, 1211-1233, 1212-1234, 1700-1722, 2223-2245, 2224-2246, 2225-2247, or 3232-3254 of SEQ ID NO:6, such as about 85%, about 90%, about 91%, about 92%, about 93%, about 94%, about 95%, about 96%, about 97%, about 98%, or about 99% complementary.

[0182] In some embodiments, the antisense polynucleotides disclosed herein are substantially complementary to the target DPP4 sequence and comprise a contiguous nucleotide sequence which is at least about 80% complementary over its entire length to nucleotides 2224-2246 of SEQ ID NO:6, such as about 85%, about 90%, about 91%, about 92%, about 93%, about 94%, about 95%, about 96%, about 97%, about 98%, or about 99% complementary.

[0183] In some embodiments, the antisense polynucleotides disclosed herein are substantially complementary to the target DPP4 sequence and comprise a contiguous nucleotide sequence which is at least about 80% complementary over its entire length to nucleotides 1211-1233 of SEQ ID NO:6, such as about 85%, about 90%, about 91%, about 92%, about 93%, about 94%, about 95%, about 96%, about 97%, about 98%, or about 99% complementary.

[0184] In one embodiment, an RNAi agent of the disclosure includes a sense strand that is substantially complementary to an antisense polynucleotide which, in turn, is the same as a target DPP4 sequence, and wherein the sense strand polynucleotide comprises a contiguous nucleotide sequence which is at least about 80% complementary over its entire length to the equivalent region of the nucleotide sequence of SEQ ID NOs: 16-30, or a fragment of any one of SEQ ID NOs: 16-30, such as about 86%, 87%, 88%, 89%, 90%, 91%, 92%, 93%, 94%, 95%, 96%, 97%, 98%, or about 99% complementary.

[0185] In some embodiments, an iRNA of the invention includes a sense strand that is substantially complementary to an antisense polynucleotide which, in turn, is complementary to a target DPP4 sequence, and wherein the sense strand polynucleotide comprises a contiguous nucleotide sequence which is at least about 80% complementary over its entire length to any one of the antisense strand nucleotide sequences in any one of any one of Tables 2-3 and 5-6, or a fragment of any one of the antisense strand nucleotide sequences in any one of Tables 2-3 and 5-6, such as about 86%, 87%, 88%, 89%, 90%, 91%, 92%, 93%, 94%, 95%, 96%, 97%, 98%, or about 99% complementary.

[0186] In some embodiments, the sense and antisense strands are selected from any one of duplexes AD-1286365.1, AD-1286369.1, AD-1286370.1, AD-1286371.1, AD-1286372.1, AD-1286373.1, AD-1286829.1, AD-1287272.1, AD-1287273.1, AD-1287274.1, and AD-1288171.1.

[0187] In some embodiments, the sense and antisense strands are from duplex AD-1287273.1.

[0188] In some embodiments, the sense and antisense strands are from duplex AD-1286372.1.

[0189] In some embodiments, the double-stranded region of a double-stranded iRNA agent is equal to or at least, 10, 11, 12, 13, 14, 15, 16, 17, 18, 19, 20, 21, 22, 23, 23, 24, 25, 26, 27, 28, 29, 30 or more nucleotide pairs in length.

[0190] In some embodiments, the antisense strand of a double-stranded iRNA agent is equal to or at least 14, 15, 16, 17, 18, 19, 20, 21, 22, 23, 23, 24, 25, 26, 27, 28, 29, or 30 nucleotides in length.

[0191] In some embodiments, the sense strand of a double-stranded iRNA agent is equal to or at least 10, 11, 12, 13, 14, 15, 16, 17, 18, 19, 20, 21, 22, 23, 23, 24, 25, 26, 27, 28, 29, or 30 nucleotides in length.

[0192] In one embodiment, the sense and antisense strands of the double-stranded iRNA agent are each independently 15 to 30 nucleotides in length.

[0193] In one embodiment, the sense and antisense strands of the double-stranded iRNA agent are each independently 19 to 25 nucleotides in length.

[0194] In one embodiment, the sense and antisense strands of the double-stranded iRNA agent are each independently 21 to 23 nucleotides in length.

[0195] In one embodiment, the sense strand of the iRNA agent is 21-nucleotides in length, and the antisense strand is 23-nucleotides in length, wherein the strands form a double-stranded region of 21 consecutive base pairs having a 2-nucleotide long single stranded overhangs at the 3′-end.

[0196] In one aspect of the invention, an agent for use in the methods and compositions of the invention is a single-stranded antisense nucleic acid molecule that inhibits a target mRNA via an antisense inhibition mechanism. The single-stranded antisense RNA molecule is complementary to a sequence within the target mRNA. The single-stranded antisense oligonucleotides can inhibit translation in a stoichiometric manner by base pairing to the mRNA and physically obstructing the translation machinery, see Dias, N. et al., (2002) Mol Cancer Ther 1:347-355. The single-stranded antisense RNA molecule may be about 15 to about 30 nucleotides in length and have a sequence that is complementary to a target sequence. For example, the single-stranded antisense RNA molecule may comprise a sequence that is at least about 15, 16, 17, 18, 19, 20, or more contiguous nucleotides from any one of the antisense sequences described herein.

[0197] In one embodiment, at least partial suppression of the expression of a DPP4 gene, is assessed by a reduction of the amount of DPP4 mRNA which can be isolated from or detected in a first cell or group of cells in which a DPP4 gene is transcribed and which has or have been treated such that the expression of a DPP4 gene is inhibited, as compared to a second cell or group of cells substantially identical to the first cell or group of cells but which has or have not been so treated (control cells). The degree of inhibition may be expressed in terms of:

$$\frac{( mRNA in control cells ) - ( mRNA in treated cells )}{( mRNA in control cells )} \cdot 100 \%$$

[0198] In one embodiment, inhibition of expression is determined by the dual luciferase method wherein the RNAi agent is present at 10 nM.

[0199] The phrase “contacting a cell with an RNAi agent,” such as a dsRNA, as used herein, includes contacting a cell by any possible means. Contacting a cell with an RNAi agent includes contacting a cell in vitro with the RNAi agent or contacting a cell in vivo with the RNAi agent. The contacting may be done directly or indirectly. Thus, for example, the RNAi agent may be put into physical contact with the cell by the individual performing the method, or alternatively, the RNAi agent may be put into a situation that will permit or cause it to subsequently come into contact with the cell.

[0200] Contacting a cell in vitro may be done, for example, by incubating the cell with the RNAi agent. Contacting a cell in vivo may be done, for example, by injecting the RNAi agent into or near the tissue where the cell is located, or by injecting the RNAi agent into another area, or to the bloodstream or the subcutaneous space, such that the agent will subsequently reach the tissue where the cell to be contacted is located. For example, the RNAi agent may contain or be coupled to a ligand, e.g., a lipophilic moiety or moieties as described below and further detailed, e.g., in PCT Publication No. WO 2019/217459, the entire contents of which is incorporated herein by reference, that directs or otherwise stabilizes the RNAi agent at a site of interest, e.g., the liver. In some embodiments, the RNAi agent may contain or be coupled to a ligand, e.g., one or more GalNAc derivatives as described below, that directs or otherwise stabilizes the RNAi agent at a site of interest, e.g., the liver. In other embodiments, the RNAi agent may contain or be coupled to a lipophilic moiety or moieties and one or more GalNAc derivatives. Combinations of in vitro and in vivo methods of contacting are also possible. For example, a cell may also be contacted in vitro with an RNAi agent and subsequently transplanted into a subject.

[0201] In one embodiment, contacting a cell with an RNAi agent includes “introducing” or “delivering the RNAi agent into the cell” by facilitating or effecting uptake or absorption into the cell. Absorption or uptake of a RNAi agent can occur through unaided diffusive or active cellular processes, or by auxiliary agents or devices. Introducing a RNAi agent into a cell may be in vitro or in vivo. For example, for in vivo introduction, a RNAi agent can be injected into a tissue site or administered systemically. In vitro introduction into a cell includes methods known in the art such as electroporation and lipofection. Further approaches are described herein below or are known in the art.

[0202] The term “lipophile” or “lipophilic moiety” broadly refers to any compound or chemical moiety having an affinity for lipids. One way to characterize the lipophilicity of the lipophilic moiety is by the octanol-water partition coefficient, log K_{ow}, where K_{ow} is the ratio of a chemical's concentration in the octanol-phase to its concentration in the aqueous phase of a two-phase system at equilibrium. The octanol-water partition coefficient is a laboratory-measured property of a substance. However, it may also be predicted by using coefficients attributed to the structural components of a chemical which are calculated using first-principle or empirical methods (see, for example, Tetko et al., J. Chem. Inf Comput. Sci. 41:1407-21 (2001), which is incorporated herein by reference in its entirety). It provides a thermodynamic measure of the tendency of the substance to prefer a non-aqueous or oily milieu rather than water (i.e. its hydrophilic/lipophilic balance). In principle, a chemical substance is lipophilic in character when its log K_{ow} exceeds 0. Typically, the lipophilic moiety possesses a log K_{ow} exceeding 1, exceeding 1.5, exceeding 2, exceeding 3, exceeding 4, exceeding 5, or exceeding 10. For instance, the log K_{ow} of 6-amino hexanol, for instance, is predicted to be approximately 0.7. Using the same method, the log K_{ow} of cholesteryl N-(hexan-6-ol) carbamate is predicted to be 10.7.

[0203] The lipophilicity of a molecule can change with respect to the functional group it carries. For instance, adding a hydroxyl group or amine group to the end of a lipophilic moiety can increase or decrease the partition coefficient (e.g., log K_{ow}) value of the lipophilic moiety.

[0204] Alternatively, the hydrophobicity of the double-stranded RNAi agent, conjugated to one or more lipophilic moieties, can be measured by its protein binding characteristics. For instance, in certain embodiments, the unbound fraction in the plasma protein binding assay of the double-stranded RNAi agent could be determined to positively correlate to the relative hydrophobicity of the double-stranded RNAi agent, which could then positively correlate to the silencing activity of the double-stranded RNAi agent.

[0205] In one embodiment, the plasma protein binding assay determined is an electrophoretic mobility shift assay (EMSA) using human serum albumin protein. An exemplary protocol of this binding assay is illustrated in detail in, e.g., PCT Publication No. WO 2019/217459. The hydrophobicity of the double-stranded RNAi agent, measured by fraction of unbound siRNA in the binding assay, exceeds 0.15, exceeds 0.2, exceeds 0.25, exceeds 0.3, exceeds 0.35, exceeds 0.4, exceeds 0.45, or exceeds 0.5 for an enhanced in vivo delivery of siRNA.

[0206] Accordingly, conjugating the lipophilic moieties to the internal position(s) of the double-stranded RNAi agent provides optimal hydrophobicity for the enhanced in vivo delivery of siRNA.

[0207] The term “lipid nanoparticle” or “LNP” is a vesicle comprising a lipid layer encapsulating a pharmaceutically active molecule, such as a nucleic acid molecule, e.g., a RNAi agent or a plasmid from which a RNAi agent is transcribed. LNPs are described in, for example, U.S. Pat. Nos. 6,858,225, 6,815,432, 8,158,601, and 8,058,069, the entire contents of which are hereby incorporated herein by reference.

[0208] As used herein, a “subject” is an animal, such as a mammal, including a primate (such as a human, a non-human primate, e.g., a monkey, and a chimpanzee), or a non-primate (such as a a cow, a pig, a horse, a goat, a rabbit, a sheep, a hamster, a guinea pig, a cat, a dog, a rat, or a mouse), or a bird that expresses the target gene, either endogenously or heterologously. In one embodiment, the subject is a human, such as a human being treated or assessed for a disease, disorder, or condition that would benefit from reduction in DPP4 expression; a human at risk for a disease, disorder, or condition that would benefit from reduction in DPP4 expression; a human having a disease, disorder, or condition that would benefit from reduction in DPP4 expression; or human being treated for a disease, disorder, or condition that would benefit from reduction in DPP4 expression as described herein. In some embodiments, the subject is a female human. In other embodiments, the subject is a male human. In one embodiment, the subject is an adult subject. In another embodiment, the subject is a pediatric subject.

[0209] As used herein, the terms “treating” or “treatment” refer to a beneficial or desired result including, but not limited to, alleviation or amelioration of one or more signs or symptoms associated with DPP4 expression or DPP4 protein production, e.g., a DPP4-associated disease, e.g., a metabolic disease, e.g., diabetes, or lipid metabolism disorders, or symptoms associated with unwanted DPP4 expression; diminishing the extent of unwanted DPP4 activation or stabilization; amelioration or palliation of unwanted DPP4 activation or stabilization. “Treatment” can also mean prolonging survival as compared to expected survival in the absence of treatment.

[0210] The term “lower” in the context of the level of DPP4 in a subject or a disease marker or symptom refers to a statistically significant decrease in such level. The decrease can be, for example, at least 10%, 15%, 20%, 25%, 30%, %, 40%, 45%, 50%, 55%, 60%, 65%, 70%, 75%, 80%, 85%, 90%, 95%, or more. In certain embodiments, a decrease is at least 20%. In certain embodiments, the decrease is at least 50% in a disease marker, e.g., protein or gene expression level. “Lower” in the context of the level of DPP4 in a subject is a decrease to a level accepted as within the range of normal for an individual without such disorder. In certain embodiments, the expression of the target is normalized, i.e., decreased towards or to a level accepted as within the range of normal for an individual without such disorder, e.g., blood glucose level, blood lipid level, blood oxygen level, white blood cell count, kidney function, spleen function, liver function. As used here, “lower” in a subject can refer to lowering of gene expression or protein production in a cell in a subject does not require lowering of expression in all cells or tissues of a subject. For example, as used herein, lowering in a subject can include lowering of gene expression or protein production in a subject.

[0211] The term “lower” can also be used in association with normalizing a symptom of a disease or condition, i.e. decreasing the difference between a level in a subject suffering from a DPP4-associated disease towards or to a level in a normal subject not suffering from a DPP4-associated disease. As used herein, if a disease is associated with an elevated value for a symptom, “normal” is considered to be the upper limit of normal. If a disease is associated with a decreased value for a symptom, “normal” is considered to be the lower limit of normal.

[0212] As used herein, “prevention” or “preventing,” when used in reference to a disease, disorder, or condition thereof, that would benefit from a reduction in expression of a DPP4 gene or production of a DPP4 protein, refers to a reduction in the likelihood that a subject will develop a symptom associated with such a disease, disorder, or condition, e.g., a symptom of a DPP4-associated disease, e.g., a metabolic disease, e.g., diabetes, or lipid metabolism disorders. The failure to develop a disease, disorder, or condition, or the reduction in the development of a symptom associated with such a disease, disorder, or condition (e.g., by at least about 10% on a clinically accepted scale for that disease or disorder), or the exhibition of delayed symptoms delayed (e.g., by days, weeks, months or years) is considered effective prevention.

[0213] As used herein, the term “DPP4-associated disease,” is a disease or disorder that would benefit from reduction in the expression or activity of DPP4. The term “DPP4-associated disease,” is a disease or disorder that is caused by, or associated with, DPP4 expression or DPP4 protein production. The term “DPP4-associated disease” includes a disease, disorder or condition that would benefit from a decrease in DPP4 expression or DPP4 protein activity. Non-limiting examples of DPP4-associated diseases include, for example, metabolic diseases, e.g., diabetes (type I or type II diabetes) or lipid metabolism disorders.

[0214] As used herein, a “metabolic disease” refers to any disease or disorder that disrupts normal metabolism, the process of converting food to energy on a cellular level. Metabolic diseases affect the ability of the cell to perform critical biochemical reactions that involve the processing or transport of proteins (amino acids), carbohydrates (sugars and starches), or lipids (fatty acids). Non-limiting examples of metabolic diseases include disorders of carbohydrates, e.g., diabetes, galactosemia, hereditary fructose intolerance, fructose 1,6-diphosphatase deficiency, glycogen storage disorders, congenital disorders of glycosylation, insulin resistance, insulin insufficiency, hyperinsulinemia, impaired glucose tolerance (IGT), abnormal glycogen metabolism; disorders of amino acid metabolism, e.g., maple syrup urine disease (MSUD), or homocystinuria; disorder of organic acid metabolism, e.g., methylmalonic aciduria, 3-methylglutaconic aciduria—Barth syndrome, glutaric aciduria or 2-hydroxyglutaric aciduria—D and L forms; disorders of faccy acid beta-oxidation, e.g., medium-chain acyl-CoA dehydrogenase deficiency (MCAD), long-chain 3-hydroxyacyl-CoA dehydrogenase deficiency (LCHAD), very-long-chain acyl-CoA dehydrogenase deficiency (VLCAD); disorders of lipid metabolism, e.g., GM1 Gangliosidosis, Tay-Sachs Disease, Sandhoff Disease, Fabry Disease, Gaucher Disease, Niemann-Pick Disease, Krabbe Disease, Mucolipidoses, or Mucopolysaccharidoses; mitochondrial disorders, e.g., mitochondrial cardiomyopathies; Leigh disease; mitochondrial encephalopathy, lactic acidosis, and stroke-like episodes (MELAS); myoclonic epilepsy with ragged-red fibers (MERRF); neuropathy, ataxia, and retinitis pigmentosa (NARP); Barth syndrome; or peroxisomal disorders, e.g., Zellweger Syndrome (cerebrohepatorenal syndrome), X-Linked Adrenoleukodystrophy or Refsum Disease.

[0215] As used herein, a “lipid metabolism disorder” or “disorder of lipid metabolism” refers to any disorder associated with or caused by a disturbance in lipid metabolism. This term also includes any disorder, disease or condition that can lead to hyperlipidemia, or condition characterized by abnormal elevation of levels of any or all lipids and/or lipoproteins in the blood. This term refers to an inherited disorder, such as familial hypertriglyceridemia, familial partial lipodystrophy type 1 (FPLD1), or an induced or acquired disorder, such as a disorder induced or acquired as a result of a disease, disorder or condition (e.g., renal failure), a diet, or intake of certain drugs (e.g., as a result of highly active antiretroviral therapy (HAART) used for treating, e.g., AIDS or HIV).

[0216] Additional examples of disorders of lipid metabolism include, but are not limited to, atherosclerosis, dyslipidemia, hypertriglyceridemia (including drug-induced hypertriglyceridemia, diuretic-induced hypertriglyceridemia, alcohol-induced hypertriglyceridemia, β-adrenergic blocking agent-induced hypertriglyceridemia, estrogen-induced hypertriglyceridemia, glucocorticoid-induced hypertriglyceridemia, retinoid-induced hypertriglyceridemia, cimetidine-induced hypertriglyceridemia, and familial hypertriglyceridemia), acute pancreatitis associated with hypertriglyceridemia, chylomicron syndrome, familial chylomicronemia, Apo-E deficiency or resistance, LPL deficiency or hypoactivity, hyperlipidemia (including familial combined hyperlipidemia), hypercholesterolemia, gout associated with hypercholesterolemia, xanthomatosis (subcutaneous cholesterol deposits), hyperlipidemia with heterogeneous LPL deficiency, hyperlipidemia with high LDL and heterogeneous LPL deficiency, fatty liver disease, or nonalcoholic steatohepatitis (NASH).

[0217] Cardiovascular diseases are also considered “metabolic disorders”, as defined herein. These diseases may include coronary artery disease (also called ischemic heart disease), hypertension, inflammation associated with coronary artery disease, restenosis, peripheral vascular diseases, and stroke.

[0218] Disorders related to body weight are also considered “metabolic disorders”, as defined herein. Such disorders may include obesity, metabolic syndrome including independent components of metabolic syndrome (e.g., central obesity, FBG/pre-diabetes/diabetes, hypercholesterolemia, hypertriglyceridemia, and hypertension), hypo-metabolic states, hypothyroidism, uremia, and other conditions associated with weight gain (including rapid weight gain), weight loss, maintenance of weight loss, or risk of weight regain following weight loss.

[0219] Blood sugar disorders are further considered “metabolic disorders”, as defined herein. Such disorders may include diabetes, hypertension, and polycystic ovarian syndrome related to insulin resistance. Other exemplary disorders of metabolic disorders may also include renal transplantation, nephrotic syndrome, Cushing's syndrome, acromegaly, systemic lupus erythematosus, dysglobulinemia, lipodystrophy, glycogenosis type I, and Addison's disease.

[0220] Additional diseases or conditions related to metabolic disorders that would be apparent to the skilled artisan and are within the scope of this disclosure.

[0221] The symptoms for a DPP4-associated disease, e.g., a metabolic disease, include, for example, a loss of fat-free or lean muscle mass, an excess of fat mass, a lower metabolic rate, insulin resistance, lack of ability to regulate blood sugar, weight gain, and/or increase in body mass index. Further details regarding signs and symptoms of the various diseases or conditions are provided herein and are well known in the art.

[0222] As used herein, the term “diabetes” refers to a group of metabolic diseases characterized by high blood sugar (glucose) levels which result from defects in insulin secretion or action, or both. There are two most common types of diabetes, namely type 1 diabetes and type 2 diabetes, which both result from the body's inability to regulate insulin. Insulin is a hormone released by the pancreas in response to increased levels of blood sugar (glucose) in the blood.

[0223] The term “type 1 diabetes,” as used herein, refers to a chronic disease that occurs when the pancreas produces too little insulin to regulate blood sugar levels appropriately. Type 1 diabetes is also referred to as insulin-dependent diabetes mellitus, IDDM, and juvenile onset diabetes. People with type I diabetes (insulin-dependent diabetes) produce little or no insulin at all. Although about 6 percent of the United States population has some form of diabetes, only about 10 percent of all diabetics have type I disorder. Most people who have type I diabetes developed the disorder before age 30. Type 1 diabetes represents is the result of a progressive autoimmune destruction of the pancreatic f-cells with subsequent insulin deficiency. More than 90 percent of the insulin-producing cells (beta cells) of the pancreas are permanently destroyed. The resulting insulin deficiency is severe, and to survive, a person with type I diabetes must regularly inject insulin.

[0224] In type II diabetes (also referred to as noninsulin-dependent diabetes mellitus, NDDM), the pancreas continues to manufacture insulin, sometimes even at higher than normal levels. However, the body develops resistance to its effects, resulting in a relative insulin deficiency. Type II diabetes may occur in children and adolescents but usually begins after age 30 and becomes progressively more common with age: about 15 percent of people over age 70 have type II diabetes. Obesity is a risk factor for type II diabetes, and 80 to 90 percent of the people with this disorder are obese.

[0225] In some embodiments, diabetes includes pre-diabetes. “Pre-diabetes” refers to one or more early diabetic conditions including impaired glucose utilization, abnormal or impaired fasting glucose levels, impaired glucose tolerance, impaired insulin sensitivity and insulin resistance. Prediabetes is a major risk factor for the development of type 2 diabetes mellitus, cardiovascular disease and mortality. Much focus has been given to developing therapeutic interventions that prevent the development of type 2 diabetes by effectively treating prediabetes.

[0226] Diabetes can be diagnosed by the administration of a glucose tolerance test. Clinically, diabetes is often divided into several basic categories. Primary examples of these categories include, autoimmune diabetes mellitus, non-insulin-dependent diabetes mellitus (type 1 NDDM), insulin-dependent diabetes mellitus (type 2 IDDM), non-autoimmune diabetes mellitus, non-insulin-dependent diabetes mellitus (type 2 NIDDM), and maturity-onset diabetes of the young (MODY). A further category, often referred to as secondary, refers to diabetes brought about by some identifiable condition which causes or allows a diabetic syndrome to develop. Examples of secondary categories include, diabetes caused by pancreatic disease, hormonal abnormalities, drug- or chemical-induced diabetes, diabetes caused by insulin receptor abnormalities, diabetes associated with genetic syndromes, and diabetes of other causes. (see e.g., Harrison's (1996) 14th ed., New York, McGraw-Hill).

[0227] “Therapeutically effective amount,” as used herein, is intended to include the amount of an RNAi agent that, when administered to a subject having a DPP4-associated disease, is sufficient to effect treatment of the disease (e.g., by diminishing, ameliorating, or maintaining the existing disease or one or more symptoms of disease). The “therapeutically effective amount” may vary depending on the RNAi agent, how the agent is administered, the disease and its severity and the history, age, weight, family history, genetic makeup, the types of preceding or concomitant treatments, if any, and other individual characteristics of the subject to be treated.

[0228] “Prophylactically effective amount,” as used herein, is intended to include the amount of a RNAi agent that, when administered to a subject having a DPP4-associated disorder, e.g., a metabolic disease, e.g., diabetes or lipid metabolism disorders, is sufficient to prevent or ameliorate the disease or one or more symptoms of the disease. Ameliorating the disease includes slowing the course of the disease or reducing the severity of later-developing disease. The “prophylactically effective amount” may vary depending on the RNAi agent, how the agent is administered, the degree of risk of disease, and the history, age, weight, family history, genetic makeup, the types of preceding or concomitant treatments, if any, and other individual characteristics of the patient to be treated.

[0229] A “therapeutically-effective amount” or “prophylacticaly effective amount” also includes an amount of a RNAi agent that produces some desired local or systemic effect at a reasonable benefit/risk ratio applicable to any treatment. A RNAi agent employed in the methods of the present disclosure may be administered in a sufficient amount to produce a reasonable benefit/risk ratio applicable to such treatment.

[0230] The phrase “pharmaceutically acceptable” is employed herein to refer to those compounds, materials, compositions, or dosage forms which are, within the scope of sound medical judgment, suitable for use in contact with the tissues of human subjects and animal subjects without excessive toxicity, irritation, allergic response, or other problem or complication, commensurate with a reasonable benefit/risk ratio.

[0231] The phrase “pharmaceutically-acceptable carrier” as used herein means a pharmaceutically-acceptable material, composition or vehicle, such as a liquid or solid filler, diluent, excipient, manufacturing aid (e.g., lubricant, talc magnesium, calcium or zinc stearate, or steric acid), or solvent encapsulating material, involved in carrying or transporting the subject compound from one organ, or portion of the body, to another organ, or portion of the body. Each carrier must be “acceptable” in the sense of being compatible with the other ingredients of the formulation and not injurious to the subject being treated. Some examples of materials which can serve as pharmaceutically-acceptable carriers include: (1) sugars, such as lactose, glucose and sucrose; (2) starches, such as corn starch and potato starch; (3) cellulose, and its derivatives, such as sodium carboxymethyl cellulose, ethyl cellulose and cellulose acetate; (4) powdered tragacanth; (5) malt; (6) gelatin; (7) lubricating agents, such as magnesium state, sodium lauryl sulfate and talc; (8) excipients, such as cocoa butter and suppository waxes; (9) oils, such as peanut oil, cottonseed oil, safflower oil, sesame oil, olive oil, corn oil and soybean oil; (10) glycols, such as propylene glycol; (11) polyols, such as glycerin, sorbitol, mannitol and polyethylene glycol; (12) esters, such as ethyl oleate and ethyl laurate; (13) agar; (14) buffering agents, such as magnesium hydroxide and aluminum hydroxide; (15) alginic acid; (16) pyrogen-free water; (17) isotonic saline; (18) Ringer's solution; (19) ethyl alcohol; (20) pH buffered solutions; (21) polyesters, polycarbonates or polyanhydrides; (22) bulking agents, such as polypeptides and amino acids (23) serum component, such as serum albumin, HDL and LDL; and (22) other non-toxic compatible substances employed in pharmaceutical formulations. Pharmaceutically acceptable carriers for pulmonary delivery are known in the art and will vary depending on the desired location for deposition of the agent, e.g., upper or lower respiratory system, and the type of device to be used for delivery, e.g., sprayer, nebulizer, dry powder inhaler.

[0232] As used herein, “respiratory system” is understood as the structures through which air moves from outside the body into the lungs and back out, e.g., the mouth, nose and nasal cavity, sinus, trachea, pharynyx, larynx, bronchial tubes/bronchi, bronchioles, alveoli, and vasculature, e.g., capillaries, hematopoietic cells, lymphatics, and lungs, and the cells, tissues, and fluids present therein.

[0233] As used herein, “delivery by inhalation” and the like include delivery by inhalation through the nose or mouth, including intratracheal administration. Delivery by inhalation typically is performed using a device, e.g., inhaler, sprayer, nebulizer, that is selected, in part, based on the location that the agent is to be delivered, e.g., nose, mouth, lungs, and the type of material to be delivered, e.g., drops, mist, dry powder.

[0234] The term “sample,” as used herein, includes a collection of similar fluids, cells, or tissues isolated from a subject, as well as fluids, cells, or tissues present within a subject. Examples of biological fluids include blood, serum and serosal fluids, plasma, bronchial fluids, sputum, cerebrospinal fluid, ocular fluids, lymph, urine, saliva, sputum, and the like. Tissue samples may include samples from tissues, organs or localized regions. For example, samples may be derived from particular organs, parts of organs, or fluids or cells within those organs.

### II. RNAi Agents of the Disclosure

[0235] Described herein are RNAi agents which inhibit the expression of a DPP4 gene. In one embodiment, the RNAi agent includes double stranded ribonucleic acid (dsRNA) molecules for inhibiting the expression of a DPP4 gene in a cell, such as a cell within a subject, e.g., a mammal, such as a human, e.g., a subject having a DPP4-associated disorder, e.g., a metabolic disease, e.g., diabetes or lipid metabolism disorders, or a subject at risk of a DPP4-associated disease.

[0236] The dsRNA includes an antisense strand having a region of complementarity which is complementary to at least a part of a target RNA, e.g., an mRNA formed in the expression of a DPP4 gene. The region of complementarity is about 15-30 nucleotides or less in length. Upon contact with a cell expressing the DPP4 gene, the RNAi agent inhibits the expression of the DPP4 gene (e.g., a human gene, a primate gene, a non-primate gene) by at least 50% as assayed by, for example, a PCR or branched DNA (bDNA)-based method, or by a protein-based method, such as by immunofluorescence analysis, using, for example, western blotting or flowcytometric techniques. In certain embodiments, inhibition of expression is by at least 50% as assayed by the Dual-Glo lucifierase assay in Example lwhere the siRNA is at a 10 nM concentration.

[0237] A dsRNA includes two RNA strands that are complementary and hybridize to form a duplex structure under conditions in which the dsRNA will be used. One strand of a dsRNA (the antisense strand) includes a region of complementarity that is substantially complementary, and generally fully complementary, to a target sequence. For example, the target sequence can be derived from the sequence of an mRNA formed during the expression of a DPP4 gene. The other strand (the sense strand) includes a region that is complementary to the antisense strand, such that the two strands hybridize and form a duplex structure when combined under suitable conditions. As described elsewhere herein and as known in the art, the complementary sequences of a dsRNA can also be contained as self-complementary regions of a single nucleic acid molecule, as opposed to being on separate oligonucleotides.

[0238] Generally, the duplex structure is 15 to 30 base pairs in length, e.g., 15-29, 15-28, 15-27, 15-26, 15-25, 15-24, 15-23, 15-22, 15-21, 15-20, 15-19, 15-18, 15-17, 18-30, 18-29, 18-28, 18-27, 18-26, 18-25, 18-24, 18-23, 18-22, 18-21, 18-20, 19-30, 19-29, 19-28, 19-27, 19-26, 19-25, 19-24, 19-23, 19-22, 19-21, 19-20, 20-30, 20-29, 20-28, 20-27, 20-26, 20-25, 20-24,20-23, 20-22, 20-21, 21-30, 21-29, 21-28, 21-27, 21-26, 21-25, 21-24, 21-23, or 21-22 base pairs in length. In certain embodiments, the duplex structure is 18 to 25 base pairs in length, e.g., 18-25, 18-24, 18-23, 18-22, 18-21, 18-20, 19-25, 19-24, 19-23, 19-22, 19-21, 19-20, 20-25, 20-24,20-23, 20-22, 20-21, 21-25, 21-24, 21-23, 21-22, 22-25, 22-24, 22-23, 23-25, 23-24 or 24-25 base pairs in length, for example, 19-21 basepairs in length. Ranges and lengths intermediate to the above recited ranges and lengths are also contemplated to be part of the disclosure.

[0239] Similarly, the region of complementarity to the target sequence is 15 to 30 nucleotides in length, e.g., 15-29, 15-28, 15-27, 15-26, 15-25, 15-24, 15-23, 15-22, 15-21, 15-20, 15-19, 15-18, 15-17, 18-30, 18-29, 18-28, 18-27, 18-26, 18-25, 18-24, 18-23, 18-22, 18-21, 18-20, 19-30, 19-29, 19-28, 19-27, 19-26, 19-25, 19-24, 19-23, 19-22, 19-21, 19-20, 20-30, 20-29, 20-28, 20-27, 20-26, 20-25, 20-24,20-23, 20-22, 20-21, 21-30, 21-29, 21-28, 21-27, 21-26, 21-25, 21-24, 21-23, or 21-22 nucleotides in length, for example 19-23 nucleotides in length or 21-23 nucleotides in length. Ranges and lengths intermediate to the above recited ranges and lengths are also contemplated to be part of the disclosure.

[0240] In some embodiments, the dsRNA is 15 to 23 nucleotides in length, or 25 to 30 nucleotides in length. In general, the dsRNA is long enough to serve as a substrate for the Dicer enzyme. For example, it is well known in the art that dsRNAs longer than about 21-23 nucleotides can serve as substrates for Dicer. As the ordinarily skilled person will also recognize, the region of an RNA targeted for cleavage will most often be part of a larger RNA molecule, often an mRNA molecule. Where relevant, a “part” of an mRNA target is a contiguous sequence of an mRNA target of sufficient length to allow it to be a substrate for RNAi-directed cleavage (i.e., cleavage through a RISC pathway).

[0241] One of skill in the art will also recognize that the duplex region is a primary functional portion of a dsRNA, e.g., a duplex region of about 15 to 36 base pairs, e.g., 15-36, 15-35, 15-34, 15-33, 15-32, 15-31, 15-30, 15-29, 15-28, 15-27, 15-26, 15-25, 15-24, 15-23, 15-22, 15-21, 15-20, 15-19, 15-18, 15-17, 18-30, 18-29, 18-28, 18-27, 18-26, 18-25, 18-24, 18-23, 18-22, 18-21, 18-20, 19-30, 19-29, 19-28, 19-27, 19-26, 19-25, 19-24, 19-23, 19-22, 19-21, 19-20, 20-30, 20-29, 20-28, 20-27, 20-26, 20-25, 20-24,20-23, 20-22, 20-21, 21-30, 21-29, 21-28, 21-27, 21-26, 21-25, 21-24, 21-23, or 21-22 base pairs, for example, 19-21 base pairs. Thus, in one embodiment, to the extent that it becomes processed to a functional duplex, of e.g., 15-30 base pairs, that targets a desired RNA for cleavage, an RNA molecule or complex of RNA molecules having a duplex region greater than 30 base pairs is a dsRNA. Thus, an ordinarily skilled artisan will recognize that in one embodiment, a miRNA is a dsRNA. In another embodiment, a dsRNA is not a naturally occurring miRNA. In another embodiment, a RNAi agent useful to target DPP4 expression is not generated in the target cell by cleavage of a larger dsRNA.

[0242] A dsRNA as described herein can further include one or more single-stranded nucleotide overhangs e.g., 1, 2, 3, or 4 nucleotides. A nucleotide overhang can comprise or consist of a nucleotide/nucleoside analog, including a deoxynucleotide/nucleoside. The overhang(s) can be on the sense strand, the antisense strand or any combination thereof. Furthermore, the nucleotide(s) of an overhang can be present on the 5′-end, 3′-end or both ends of either an antisense or sense strand of a dsRNA. In certain embodiments, longer, extended overhangs are possible.

[0243] A dsRNA can be synthesized by standard methods known in the art as further discussed below, e.g., by use of an automated DNA synthesizer, such as are commercially available from, for example, Biosearch, Applied Biosystems, Inc.

[0244] iRNA compounds of the invention may be prepared using a two-step procedure. First, the individual strands of the double stranded RNA molecule are prepared separately. Then, the component strands are annealed. The individual strands of the siRNA compound can be prepared using solution-phase or solid-phase organic synthesis or both. Organic synthesis offers the advantage that the oligonucleotide strands comprising unnatural or modified nucleotides can be easily prepared. Single-stranded oligonucleotides of the invention can be prepared using solution-phase or solid-phase organic synthesis or both.

[0245] An siRNA can be produced, e.g., in bulk, by a variety of methods. Exemplary methods include: organic synthesis and RNA cleavage, e.g., in vitro cleavage.

[0246] An siRNA can be made by separately synthesizing a single stranded RNA molecule, or each respective strand of a double-stranded RNA molecule, after which the component strands can then be annealed.

[0247] A large bioreactor, e.g., the OligoPilot II from Pharmacia Biotec AB (Uppsala Sweden), can be used to produce a large amount of a particular RNA strand for a given siRNA. The OligoPilotII reactor can efficiently couple a nucleotide using only a 1.5 molar excess of a phosphoramidite nucleotide. To make an RNA strand, ribonucleotides amidites are used. Standard cycles of monomer addition can be used to synthesize the 21 to 23 nucleotide strand for the siRNA. Typically, the two complementary strands are produced separately and then annealed, e.g., after release from the solid support and deprotection.

[0248] Organic synthesis can be used to produce a discrete siRNA species. The complementary of the species to a DPP4 gene can be precisely specified. For example, the species may be complementary to a region that includes a polymorphism, e.g., a single nucleotide polymorphism. Further the location of the polymorphism can be precisely defined. In some embodiments, the polymorphism is located in an internal region, e.g., at least 4, 5, 7, or 9 nucleotides from one or both of the termini.

[0249] In one embodiment, RNA generated is carefully purified to remove endsiRNA is cleaved in vitro into siRNAs, for example, using a Dicer or comparable RNAse III-based activity. For example, the dsiRNA can be incubated in an in vitro extract from Drosophila or using purified components, e.g., a purified RNAse or RISC complex (RNA-induced silencing complex). See, e.g., Ketting et al. Genes Dev 2001 Oct. 15; 15(20):2654-9 and Hammond Science 2001 Aug. 10; 293(5532):1146-50.

[0250] dsiRNA cleavage generally produces a plurality of siRNA species, each being a particular 21 to 23 nucleotide fragment of a source dsiRNA molecule. For example, siRNAs that include sequences complementary to overlapping regions and adjacent regions of a source dsiRNA molecule may be present.

[0251] Regardless of the method of synthesis, the siRNA preparation can be prepared in a solution (e.g., an aqueous or organic solution) that is appropriate for formulation. For example, the siRNA preparation can be precipitated and redissolved in pure double-distilled water, and lyophilized. The dried siRNA can then be resuspended in a solution appropriate for the intended formulation process.

[0252] In one aspect, a dsRNA of the disclosure includes at least two nucleotide sequences, a sense sequence and an antisense sequence. The sense strand sequence for DPP4 may be selected from the group of sequences provided in any one of Tables 2-3 and 5-6, and the corresponding nucleotide sequence of the antisense strand of the sense strand may be selected from the group of sequences of any one of Tables 2-3 and 5-6. In this aspect, one of the two sequences is complementary to the other of the two sequences, with one of the sequences being substantially complementary to a sequence of an mRNA generated in the expression of a DPP4 gene. As such, in this aspect, a dsRNA will include two oligonucleotides, where one oligonucleotide is described as the sense strand (passenger strand) in any one of Tables 2-3 and 5-6, and the second oligonucleotide is described as the corresponding antisense strand (guide strand) of the sense strand in any one of Tables 2-3 and 5-6 for DPP4.

[0253] In one embodiment, the substantially complementary sequences of the dsRNA are contained on separate oligonucleotides. In another embodiment, the substantially complementary sequences of the dsRNA are contained on a single oligonucleotide.

[0254] It will be understood that, although the sequences provided herein are described as modified or conjugated sequences, the RNA of the RNAi agent of the disclosure e.g., a dsRNA of the disclosure, may comprise any one of the sequences set forth in any one of Tables 2-3 and 5-6 that is un-modified, un-conjugated, or modified or conjugated differently than described therein. One or more lipophilic ligands or one or more GalNAc ligands can be included in any of the positions of the RNAi agents provided in the instant application.

[0255] The skilled person is well aware that dsRNAs having a duplex structure of about 20 to 23 base pairs, e.g., 21, base pairs have been hailed as particularly effective in inducing RNA interference (Elbashir et al., (2001) EMBO J., 20:6877-6888). However, others have found that shorter or longer RNA duplex structures can also be effective (Chu and Rana (2007) RNA 14:1714-1719; Kim et al. (2005) Nat Biotech 23:222-226). In the embodiments described above, by virtue of the nature of the oligonucleotide sequences provided herein, dsRNAs described herein can include at least one strand of a length of minimally 21 nucleotides. It can be reasonably expected that shorter duplexes minus only a few nucleotides on one or both ends can be similarly effective as compared to the dsRNAs described above. Hence, dsRNAs having a sequence of at least 15, 16, 17, 18, 19, 20, or more contiguous nucleotides derived from one of the sequences provided herein, and differing in their ability to inhibit the expression of a DPP4 gene by not more than 10, 15, 20, 25, or 30% inhibition from a dsRNA comprising the full sequence using the in vitro assay with Cos 7 and a 10 nM concentration of the RNA agent and the PCR assay as provided in the examples herein, are contemplated to be within the scope of the present disclosure.

[0256] In addition, the RNAs described herein identify a site(s) in a DPP4 transcript that is susceptible to RISC-mediated cleavage. As such, the present disclosure further features RNAi agents that target within this site(s). As used herein, a RNAi agent is said to target within a particular site of an RNA transcript if the RNAi agent promotes cleavage of the transcript anywhere within that particular site. Such a RNAi agent will generally include at least about 15 contiguous nucleotides, such as at least 19 nucleotides, from one of the sequences provided herein coupled to additional nucleotide sequences taken from the region contiguous to the selected sequence in a DPP4 gene.

[0257] An RNAi agent as described herein can contain one or more mismatches to the target sequence. In one embodiment, an RNAi agent as described herein contains no more than 3 mismatches (i.e., 3, 2, 1, or 0 mismatches). In one embodiment, an RNAi agent as described herein contains no more than 2 mismatches. In one embodiment, an RNAi agent as described herein contains no more than 1 mismatch. In one embodiment, an RNAi agent as described herein contains 0 mismatches. In certain embodiments, if the antisense strand of the RNAi agent contains mismatches to the target sequence, the mismatch can optionally be restricted to be within the last 5 nucleotides from either the 5′- or 3′-end of the region of complementarity. For example, in such embodiments, for a 23 nucleotide RNAi agent, the strand which is complementary to a region of a DPP4 gene generally does not contain any mismatch within the central 13 nucleotides. The methods described herein or methods known in the art can be used to determine whether an RNAi agent containing a mismatch to a target sequence is effective in inhibiting the expression of a DPP4 gene. Consideration of the efficacy of RNAi agents with mismatches in inhibiting expression of a DPP4 gene is important, especially if the particular region of complementarity in a DPP4 gene is known to mutate.

### III. Modified RNAi Agents of the Disclosure

[0258] In one embodiment, the RNA of the RNAi agent of the disclosure e.g., a dsRNA, is un-modified, and does not comprise, e.g., chemical modifications or conjugations known in the art and described herein. In certain embodiments, the RNA of an RNAi agent of the disclosure, e.g., a dsRNA, is chemically modified to enhance stability or other beneficial characteristics. In certain embodiments of the disclosure, substantially all of the nucleotides of an RNAi agent of the disclosure are modified. In other embodiments of the disclosure, all of the nucleotides of an RNAi agent of the disclosure are modified. RNAi agents of the disclosure in which “substantially all of the nucleotides are modified” are largely but not wholly modified and can include not more than 5, 4, 3, 2, or 1 unmodified nucleotides. In still other embodiments of the disclosure, RNAi agents of the disclosure can include not more than 5, 4, 3, 2 or 1 modified nucleotides.

[0259] The nucleic acids featured in the disclosure can be synthesized or modified by methods well established in the art, such as those described in “Current protocols in nucleic acid chemistry,” Beaucage, S. L. et al. (Edrs.), John Wiley & Sons, Inc., New York, NY, USA, which is hereby incorporated herein by reference. Modifications include, for example, end modifications, e.g., 5′-end modifications (phosphorylation, conjugation, inverted linkages) or 3′-end modifications (conjugation, DNA nucleotides, inverted linkages, etc.); base modifications, e.g., replacement with stabilizing bases, destabilizing bases, or bases that base pair with an expanded repertoire of partners, removal of bases (abasic nucleotides), or conjugated bases; sugar modifications (e.g., at the 2′-position or 4′-position) or replacement of the sugar; or backbone modifications, including modification or replacement of the phosphodiester linkages. Specific examples of RNAi agents useful in the embodiments described herein include, but are not limited to, RNAs containing modified backbones or no natural internucleoside linkages. RNAs having modified backbones include, among others, those that do not have a phosphorus atom in the backbone. For the purposes of this specification, and as sometimes referenced in the art, modified RNAs that do not have a phosphorus atom in their internucleoside backbone can also be considered to be oligonucleosides. In some embodiments, a modified RNAi agent will have a phosphorus atom in its internucleoside backbone.

[0260] Modified RNA backbones include, for example, phosphorothioates, chiral phosphorothioates, phosphorodithioates, phosphotriesters, aminoalkylphosphotriesters, methyl and other alkyl phosphonates including 3′-alkylene phosphonates and chiral phosphonates, phosphinates, phosphoramidates including 3′-amino phosphoramidate and aminoalkylphosphoramidates, thionophosphoramidates, thionoalkylphosphonates, thionoalkylphosphotriesters, and boranophosphates having normal 3′-5′ linkages, 2′-5′-linked analogs of these, and those having inverted polarity wherein the adjacent pairs of nucleoside units are linked 3′-5′ to 5′-3′ or 2′-5′ to 5′-2′. Various salts, e.g., sodium salts, mixed salts and free acid forms are also included.

[0261] Representative U.S. patents that teach the preparation of the above phosphorus-containing linkages include, but are not limited to, U.S. Pat. Nos. 3,687,808; 4,469,863; 4,476,301; 5,023,243; 5,177,195; 5,188,897; 5,264,423; 5,276,019; 5,278,302; 5,286,717; 5,321,131; 5,399,676; 5,405,939; 5,453,496; 5,455,233; 5,466,677; 5,476,925; 5,519,126; 5,536,821; 5,541,316; 5,550,111; 5,563,253; 5,571,799; 5,587,361; 5,625,050; 6,028,188; 6,124,445; 6,160,109; 6,169,170; 6,172,209; 6,239,265; 6,277,603; 6,326,199; 6,346,614; 6,444,423; 6,531,590; 6,534,639; 6,608,035; 6,683,167; 6,858,715; 6,867,294; 6,878,805; 7,015,315; 7,041,816; 7,273,933; 7,321,029; and U.S. Pat. RE39464, the entire contents of each of which are hereby incorporated herein by reference.

[0262] Modified RNA backbones that do not include a phosphorus atom therein have backbones that are formed by short chain alkyl or cycloalkyl internucleoside linkages, mixed heteroatoms and alkyl or cycloalkyl internucleoside linkages, or one or more short chain heteroatomic or heterocyclic internucleoside linkages. These include those having morpholino linkages (formed in part from the sugar portion of a nucleoside); siloxane backbones; sulfide, sulfoxide and sulfone backbones; formacetyl and thioformacetyl backbones; methylene formacetyl and thioformacetyl backbones; alkene containing backbones; sulfamate backbones; methyleneimino and methylenehydrazino backbones; sulfonate and sulfonamide backbones; amide backbones; and others having mixed N, O, S and CH₂ component parts.

[0263] Representative U.S. patents that teach the preparation of the above oligonucleosides include, but are not limited to, U.S. Pat. Nos. 5,034,506; 5,166,315; 5,185,444; 5,214,134; 5,216,141; 5,235,033; 5,64,562; 5,264,564; 5,405,938; 5,434,257; 5,466,677; 5,470,967; 5,489,677; 5,541,307; 5,561,225; 5,596,086; 5,602,240; 5,608,046; 5,610,289; 5,618,704; 5,623,070; 5,663,312; 5,633,360; 5,677,437; and, 5,677,439, the entire contents of each of which are hereby incorporated herein by reference.

[0264] In other embodiments, suitable RNA mimetics are contemplated for use in RNAi agents, in which both the sugar and the internucleoside linkage, i.e., the backbone, of the nucleotide units are replaced with novel groups. The base units are maintained for hybridization with an appropriate nucleic acid target compound. One such oligomeric compound, an RNA mimetic that has been shown to have excellent hybridization properties, is referred to as a peptide nucleic acid (PNA). In PNA compounds, the sugar backbone of an RNA is replaced with an amide containing backbone, in particular an aminoethylglycine backbone. The nucleobases are retained and are bound directly or indirectly to aza nitrogen atoms of the amide portion of the backbone. Representative U.S. patents that teach the preparation of PNA compounds include, but are not limited to, U.S. Pat. Nos. 5,539,082; 5,714,331; and 5,719,262, the entire contents of each of which are hereby incorporated herein by reference. Additional PNA compounds suitable for use in the RNAi agents of the disclosure are described in, for example, in Nielsen et al., Science, 1991, 254, 1497-1500.

[0265] Some embodiments featured in the disclosure include RNAs with phosphorothioate backbones and oligonucleosides with heteroatom backbones, and in particular —CH₂—NH—CH₂—, —CH₂—N(CH₃)—O—CH₂— [known as a methylene (methylimino) or MMI backbone], —CH₂—O—N(CH₃)—CH₂—, —CH₂—N(CH₃)—N(CH₃)—CH₂— and —N(CH₃)—CH₂—CH₂— of the above-referenced U.S. Pat. No. 5,489,677, and the amide backbones of the above-referenced U.S. Pat. No. 5,602,240. In some embodiments, the RNAs featured herein have morpholino backbone structures of the above-referenced U.S. Pat. No. 5,034,506. The native phosphodiester backbone can be represented as 0-P(O)(OH)—OCH2-.

[0266] Modified RNAs can also contain one or more substituted sugar moieties. The RNAi agents, e.g., dsRNAs, featured herein can include one of the following at the 2′-position: OH; F; O-, S-, or N-alkyl; O-, S-, or N-alkenyl; O-, S- or N-alkynyl; or O-alkyl-O-alkyl, wherein the alkyl, alkenyl and alkynyl can be substituted or unsubstituted C₁ to C₁₀ alkyl or C₂ to C₁₀ alkenyl and alkynyl. Exemplary suitable modifications include O[(CH₂)ₙO]ₘCH₃, O(CH₂)·ₙOCH₃, O(CH₂)ₙNH₂, O(CH₂)ₙCH₃, O(CH₂)ₙONH₂, and O(CH₂)ₙON[(CH₂)ₙCH₃)]₂, where n and m are from 1 to about 10. In other embodiments, dsRNAs include one of the following at the 2′ position: C₁ to C₁₀ lower alkyl, substituted lower alkyl, alkaryl, aralkyl, O-alkaryl or O-aralkyl, SH, SCH₃, OCN, Cl, Br, CN, CF₃, OCF₃, SOCH₃, SO₂CH₃, ONO₂, NO₂, N₃, NH₂, heterocycloalkyl, heterocycloalkaryl, aminoalkylamino, polyalkylamino, substituted silyl, an RNA cleaving group, a reporter group, an intercalator, a group for improving the pharmacokinetic properties of a RNAi agent, or a group for improving the pharmacodynamic properties of a RNAi agent, and other substituents having similar properties. In some embodiments, the modification includes a 2′-methoxyethoxy (2′-O—CH₂CH₂OCH₃, also known as 2′-O-(2-methoxyethyl) or 2′-MOE) (Martin et al., Helv. Chim. Acta, 1995, 78:486-504) i.e., an alkoxy-alkoxy group. Another exemplary modification is 2′-dimethylaminooxyethoxy, i.e., a O(CH₂)20N(CH₃)₂ group, also known as 2′-DMAOE, as described in examples herein below, and 2′-dimethylaminoethoxyethoxy (also known in the art as 2′-O-dimethylaminoethoxyethyl or 2′-DMAEOE), i.e., 2′-O—CH₂—O—CH₂—N(CH₃)2. Further exemplary modifications include: 5′-Me-2′-F nucleotides, 5′-Me-2′-OMe nucleotides, 5′-Me-2′-deoxynucleotides, (both R and S isomers in these three families); 2′-alkoxyalkyl; and 2′-NMA (N-methylacetamide).

[0267] Other modifications include 2′-methoxy (2′-OCH₃), 2′-aminopropoxy (2′-OCH₂CH₂CH₂NH₂), 2′-O-hexadecyl, and 2′-fluoro (2′-F). Similar modifications can also be made at other positions on the RNA of a RNAi agent, particularly the 3′ position of the sugar on the 3′ terminal nucleotide or in 2′-5′ linked dsRNAs and the 5′ position of 5′ terminal nucleotide. RNAi agents can also have sugar mimetics such as cyclobutyl moieties in place of the pentofuranosyl sugar. Representative U.S. patents that teach the preparation of such modified sugar structures include, but are not limited to, U.S. Pat. Nos. 4,981,957; 5,118,800; 5,319,080; 5,359,044; 5,393,878; 5,446,137; 5,466,786; 5,514,785; 5,519,134; 5,567,811; 5,576,427; 5,591,722; 5,597,909; 5,610,300; 5,627,053; 5,639,873; 5,646,265; 5,658,873; 5,670,633; and 5,700,920, certain of which are commonly owned with the instant application. The entire contents of each of the foregoing are hereby incorporated herein by reference.

[0268] An RNAi agent of the disclosure can also include nucleobase (often referred to in the art simply as “base”) modifications or substitutions. As used herein, “unmodified” or “natural” nucleobases include the purine bases adenine (A) and guanine (G), and the pyrimidine bases thymine (T), cytosine (C) and uracil (U). Modified nucleobases include other synthetic and natural nucleobases such as 5-methylcytosine (5-me-C), 5-hydroxymethyl cytosine, xanthine, hypoxanthine, 2-aminoadenine, 6-methyl and other alkyl derivatives of adenine and guanine, 2-propyl and other alkyl derivatives of adenine and guanine, 2-thiouracil, 2-thiothymine and 2-thiocytosine, 5-halouracil and cytosine, 5-propynyl uracil and cytosine, 6-azo uracil, cytosine and thymine, 5-uracil (pseudouracil), 4-thiouracil, 8-halo, 8-amino, 8-thiol, 8-thioalkyl, 8-hydroxyl anal other 8-substituted adenines and guanines, 5-halo, particularly 5-bromo, 5-trifluoromethyl and other 5-substituted uracils and cytosines, 7-methylguanine and 7-methyladenine, 8-azaguanine and 8-azaadenine, 7-deazaguanine and 7-daazaadenine and 3-deazaguanine and 3-deazaadenine. Further nucleobases include those disclosed in U.S. Pat. No. 3,687,808, those disclosed in Modified Nucleosides in Biochemistry, Biotechnology and Medicine, Herdewijn, P. ed. Wiley-VCH, 2008; those disclosed in The Concise Encyclopedia Of Polymer Science And Engineering, pages 858-859, Kroschwitz, J. L, ed. John Wiley & Sons, 1990, these disclosed by Englisch et al., (1991) Angewandte Chemie, International Edition, 30:613, and those disclosed by Sanghvi, Y S., Chapter 15, dsRNA Research and Applications, pages 289-302, Crooke, S. T. and Lebleu, B., Ed., CRC Press, 1993. Certain of these nucleobases are particularly useful for increasing the binding affinity of the oligomeric compounds featured in the disclosure. These include 5-substituted pyrimidines, 6-azapyrimidines and N-2, N-6 and 0-6 substituted purines, including 2-aminopropyladenine, 5-propynyluracil and 5-propynylcytosine. 5-methylcytosine substitutions have been shown to increase nucleic acid duplex stability by 0.6-1.2° C. (Sanghvi, Y. S., Crooke, S. T. and Lebleu, B., Eds., dsRNA Research and Applications, CRC Press, Boca Raton, 1993, pp. 276-278) and are exemplary base substitutions, even more particularly when combined with 2′-O-methoxyethyl sugar modifications.

[0269] Representative U.S. patents that teach the preparation of certain of the above noted modified nucleobases as well as other modified nucleobases include, but are not limited to, the above noted U.S. Pat. Nos. 3,687,808, 4,845,205; 5,130,30; 5,134,066; 5,175,273; 5,367,066; 5,432,272; 5,457,187; 5,459,255; 5,484,908; 5,502,177; 5,525,711; 5,552,540; 5,587,469; 5,594,121, 5,596,091; 5,614,617; 5,681,941; 5,750,692; 6,015,886; 6,147,200; 6,166,197; 6,222,025; 6,235,887; 6,380,368; 6,528,640; 6,639,062; 6,617,438; 7,045,610; 7,427,672; and 7,495,088, the entire contents of each of which are hereby incorporated herein by reference.

[0270] An RNAi agent of the disclosure can also be modified to include one or more bicyclic sugar moities. A “bicyclic sugar” is a furanosyl ring modified by a ring formed by the bridging of two carbons, whether adjacent or non-adjacent. A “bicyclic nucleoside” (“BNA”) is a nucleoside having a sugar moiety comprising a ring formed by bridging two carbons, whether adjacent or non-adjacent, of the sugar ring, thereby forming a bicyclic ring system. In certain embodiments, the bridge connects the 4′-carbon and the 2′-carbon of the sugar ring, optionally, via the 2′-acyclic oxygen atoms. Thus, in some embodiments an agent of the disclosure may include one or more locked nucleic acids (LNA). A locked nucleic acid is a nucleotide having a modified ribose moiety in which the ribose moiety comprises an extra bridge connecting the 2′ and 4′ carbons. In other words, an LNA is a nucleotide comprising a bicyclic sugar moiety comprising a 4′-CH2-O-2′ bridge. This structure effectively “locks” the ribose in the 3′-endo structural conformation. The addition of locked nucleic acids to siRNAs has been shown to increase siRNA stability in serum, and to reduce off-target effects (Elmen, J. et al., (2005) Nucleic Acids Research 33(1):439-447; Mook, O R. et al., (2007) Mol Canc Ther 6(3):833-843; Grunweller, A. et al., (2003) Nucleic Acids Research 31(12):3185-3193). Examples of bicyclic nucleosides for use in the polynucleotides of the disclosure include without limitation nucleosides comprising a bridge between the 4′ and the 2′ ribosyl ring atoms. In certain embodiments, the antisense polynucleotide agents of the disclosure include one or more bicyclic nucleosides comprising a 4′ to 2′ bridge.

[0271] A locked nucleoside can be represented by the structure (omitting stereochemistry),

[chemical structure]

[0272] wherein B is a nucleobase or modified nucleobase and L is the linking group that joins the 2′-carbon to the 4′-carbon of the ribose ring. Examples of such 4′ to 2′ bridged bicyclic nucleosides, include but are not limited to 4′-(CH2)-O-2′ (LNA); 4′-(CH2)-S-2′; 4′-(CH2)2-O-2′ (ENA); 4′-CH(CH3)-O-2′ (also referred to as “constrained ethyl” or “cEt”) and 4′-CH(CH2OCH3)-O-2′ (and analogs thereof; see, e.g., U.S. Pat. No. 7,399,845); 4′-C(CH3)(CH3)-O-2′ (and analogs thereof; see e.g., U.S. Pat. No. 8,278,283); 4′-CH2-N(OCH3)-2′ (and analogs thereof; see e.g., U.S. Pat. No. 8,278,425); 4′-CH2-O—N(CH3)-2′ (see, e.g., U.S. Patent Publication No. 2004/0171570); 4′-CH2-N(R)—O-2′, wherein R is H, C1-C12 alkyl, or a nitrogen protecting group (see, e.g., U.S. Pat. No. 7,427,672); 4′-CH2-C(H)(CH3)-2′ (see, e.g., Chattopadhyaya et al., J. Org. Chem., 2009, 74, 118-134); and 4′-CH2-C(═CH2)-2′ (and analogs thereof; see, e.g., U.S. Pat. No. 8,278,426). The entire contents of each of the foregoing are hereby incorporated herein by reference.

[0273] Additional representative US patents and US patenttent Publications that teach the preparation of locked nucleic acid nucleotides include, but are not limited to, the following: U.S. Pat. Nos. 6,268,490; 6,525,191; 6,670,461; 6,770,748; 6,794,499; 6,998,484; 7,053,207; 7,034,133; 7,084,125; 7,399,845; 7,427,672; 7,569,686; 7,741,457; 8,022,193; 8,030,467; 8,278,425; 8,278,426; 8,278,283; US 2008/0039618; and US 2009/0012281, the entire contents of each of which are hereby incorporated herein by reference.

[0274] Any of the foregoing bicyclic nucleosides can be prepared having one or more stereochemical sugar configurations including for example α-L-ribofuranose and β-D-ribofuranose (see WO 99/14226).

[0275] An RNAi agent of the disclosure can also be modified to include one or more constrained ethyl nucleotides. As used herein, a “constrained ethyl nucleotide” or “cEt” is a locked nucleic acid comprising a bicyclic sugar moiety comprising a 4′-CH(CH3)-O-2′ bridge (i.e., L in the preceding structure). In one embodiment, a constrained ethyl nucleotide is in the S conformation referred to herein as “S-cEt.”

[0276] An RNAi agent of the disclosure may also include one or more “conformationally restricted nucleotides” (“CRN”). CRN are nucleotide analogs with a linker connecting the C2′ and C4′ carbons of ribose or the —C3′ and —C5′ carbons of ribose. CRN lock the ribose ring into a stable conformation and increase the hybridization affinity to mRNA. The linker is of sufficient length to place the oxygen in an optimal position for stability and affinity resulting in less ribose ring puckering.

[0277] Representative publications that teach the preparation of certain of the above noted CRN include, but are not limited to, US 2013/0190383; and WO 2013/036868, the entire contents of each of which are hereby incorporated herein by reference.

[0278] In some embodiments, a RNAi agent of the disclosure comprises one or more monomers that are UNA (unlocked nucleic acid) nucleotides. UNA is unlocked acyclic nucleic acid, wherein any of the bonds of the sugar has been removed, forming an unlocked “sugar” residue. In one example, UNA also encompasses monomer with bonds between C1′-C4′ have been removed (i.e. the covalent carbon-oxygen-carbon bond between the C1′ and C4′ carbons). In another example, the C2′-C3′ bond (i.e. the covalent carbon-carbon bond between the C2′ and C3′ carbons) of the sugar has been removed (see Nuc. Acids Symp. Series, 52, 133-134 (2008) and Fluiter et al., Mol. Biosyst., 2009, 10, 1039 hereby incorporated by reference).

[0279] Representative U.S. publications that teach the preparation of UNA include, but are not limited to, U.S. Pat. No. 8,314,227; and US Patent Publication Nos. 2013/0096289; 2013/0011922; and 2011/0313020, the entire contents of each of which are hereby incorporated herein by reference.

[0280] Potentially stabilizing modifications to the ends of RNA molecules can include N-(acetylaminocaproyl)-4-hydroxyprolinol (Hyp-C6-NHAc), N-(caproyl-4-hydroxyprolinol (Hyp-C6), N-(acetyl-4-hydroxyprolinol (Hyp-NHAc), thymidine-2′-O-deoxythymidine (ether), N-(aminocaproyl)-4-hydroxyprolinol (Hyp-C6-amino), 2-docosanoyl-uridine-3″-phosphate, inverted base dT (idT) and others. Disclosure of this modification can be found in WO 2011/005861.

[0281] Other modifications of a RNAi agent of the disclosure include a 5′ phosphate or 5′ phosphate mimic, e.g., a 5′-terminal phosphate or phosphate mimic on the antisense strand of a RNAi agent. Suitable phosphate mimics are disclosed in, for example US 2012/0157511, the entire contents of which are incorporated herein by reference.

[0282] A. Modified RNAi Agents Comprising Motifs of the Disclosure

[0283] In certain aspects of the disclosure, the double-stranded RNAi agents of the disclosure include agents with chemical modifications as disclosed, for example, in WO 2013/075035, the entire contents of which are incorporated herein by reference. As shown herein and in WO 2013/075035, one or more motifs of three identical modifications on three consecutive nucleotides may be introduced into a sense strand or antisense strand of an RNAi agent, particularly at or near the cleavage site. In some embodiments, the sense strand and antisense strand of the RNAi agent may otherwise be completely modified. The introduction of these motifs interrupts the modification pattern, if present, of the sense or antisense strand. The RNAi agent may be optionally conjugated with a lipophilic ligand, e.g., a C16 ligand, for instance on the sense strand. The RNAi agent may be optionally modified with a (S)-glycol nucleic acid (GNA) modification, for instance on one or more residues of the antisense strand.

[0284] Accordingly, the disclosure provides double stranded RNAi agents capable of inhibiting the expression of a targetgenome or gene (i.e., a DPP4 gene) in vivo. The RNAi agent comprises a sense strand and an antisense strand. Each strand of the RNAi agent may be 15-30 nucleotides in length. For example, each strand may be 16-30 nucleotides in length, 17-30 nucleotides in length, 25-30 nucleotides in length, 27-30 nucleotides in length, 17-23 nucleotides in length, 17-21 nucleotides in length, 17-19 nucleotides in length, 19-25 nucleotides in length, 19-23 nucleotides in length, 19-21 nucleotides in length, 21-25 nucleotides in length, or 21-23 nucleotides in length. In certain embodiments, each strand is 19-23 nucleotides in length.

[0285] The sense strand and antisense strand typically form a duplex double stranded RNA (“dsRNA”), also referred to herein as an “RNAi agent.” The duplex region of an RNAi agent may be 15-30 nucleotide pairs in length. For example, the duplex region can be 16-30 nucleotide pairs in length, 17-30 nucleotide pairs in length, 27-30 nucleotide pairs in length, 17-23 nucleotide pairs in length, 17-21 nucleotide pairs in length, 17-19 nucleotide pairs in length, 19-25 nucleotide pairs in length, 19-23 nucleotide pairs in length, 19-21 nucleotide pairs in length, 21-25 nucleotide pairs in length, or 21-23 nucleotide pairs in length. In another example, the duplex region is selected from 15, 16, 17, 18, 19, 20, 21, 22, 23, 24, 25, 26, and 27 nucleotides in length. In certain embodiments, the duplex region is 19-21 nucleotide pairs in length.

[0286] In one embodiment, the RNAi agent may contain one or more overhang regions or capping groups at the 3′-end, 5′-end, or both ends of one or both strands. The overhang can be 1-6 nucleotides in length, for instance 2-6 nucleotides in length, 1-5 nucleotides in length, 2-5 nucleotides in length, 1-4 nucleotides in length, 2-4 nucleotides in length, 1-3 nucleotides in length, 2-3 nucleotides in length, or 1-2 nucleotides in length. In certain embodiments, the nucleotide overhang region is 2 nucleotides in length. The overhangs can be the result of one strand being longer than the other, or the result of two strands of the same length being staggered. The overhang can form a mismatch with the target mRNA or it can be complementary to the gene sequences being targeted or can be another sequence. The first and second strands can also be joined, e.g., by additional bases to form a hairpin, or by other non-base linkers.

[0287] In one embodiment, the nucleotides in the overhang region of the RNAi agent can each independently be a modified or unmodified nucleotide including, but no limited to 2′-sugar modified, such as, 2-F, 2′-O-methyl, thymidine (T), and any combinations thereof.

[0288] For example, TT can be an overhang sequence for either end on either strand. The overhang can form a mismatch with the target mRNA or it can be complementary to the gene sequences being targeted or can be another sequence.

[0289] The 5′- or 3′-overhangs at the sense strand, antisense strand or both strands of the RNAi agent may be phosphorylated. In some embodiments, the overhang region(s) contains two nucleotides having a phosphorothioate between the two nucleotides, where the two nucleotides can be the same or different. In one embodiment, the overhang is present at the 3′-end of the sense strand, antisense strand, or both strands. In one embodiment, this 3′-overhang is present in the antisense strand. In one embodiment, this 3′-overhang is present in the sense strand.

[0290] The RNAi agent may contain only a single overhang, which can strengthen the interference activity of the RNAi, without affecting its overall stability. For example, the single-stranded overhang may be located at the 3-terminal end of the sense strand or, alternatively, at the 3-terminal end of the antisense strand. The RNAi may also have a blunt end, located at the 5′-end of the antisense strand (i.e., the 3′-end of the sense strand) or vice versa. Generally, the antisense strand of the RNAi has a nucleotide overhang at the 3′-end, and the 5′-end is blunt. While not wishing to be bound by theory, the asymmetric blunt end at the 5′-end of the antisense strand and 3′-end overhang of the antisense strand favor the guide strand loading into RISC process.

[0291] In one embodiment, the RNAi agent is a double blunt-ended of 19 nucleotides in length, wherein the sense strand contains at least one motif of three 2′-F modifications on three consecutive nucleotides at positions 7, 8, and 9 from the 5′end. The antisense strand contains at least one motif of three 2′-O-methyl modifications on three consecutive nucleotides at positions 11, 12, and 13 from the 5′end.

[0292] In another embodiment, the RNAi agent is a double blunt-ended of 20 nucleotides in length, wherein the sense strand contains at least one motif of three 2′-F modifications on three consecutive nucleotides at positions 8, 9, and 10 from the 5′end. The antisense strand contains at least one motif of three 2′-O-methyl modifications on three consecutive nucleotides at positions 11, 12, and 13 from the 5′end.

[0293] In yet another embodiment, the RNAi agent is a double blunt-ended of 21 nucleotides in length, wherein the sense strand contains at least one motif of three 2′-F modifications on three consecutive nucleotides at positions 9, 10, and 11 from the 5′end. The antisense strand contains at least one motif of three 2′-O-methyl modifications on three consecutive nucleotides at positions 11, 12, and 13 from the 5′end.

[0294] In one embodiment, the RNAi agent comprises a 21 nucleotide sense strand and a 23 nucleotide antisense strand, wherein the sense strand contains at least one motif of three 2′-F modifications on three consecutive nucleotides at positions 9, 10, and 11 from the 5′end; the antisense strand contains at least one motif of three 2′-O-methyl modifications on three consecutive nucleotides at positions 11, 12, and 13 from the 5′end, wherein one end of the RNAi agent is blunt, while the other end comprises a 2 nucleotide overhang. In one example, the two nucleotide overhang is at the 3′-end of the antisense strand. When the 2 nucleotide overhang is at the 3′-end of the antisense strand, there may be two phosphorothioate internucleotide linkages between the terminal three nucleotides, wherein two of the three nucleotides are the overhang nucleotides, and the third nucleotide is a paired nucleotide next to the overhang nucleotide. In one embodiment, the RNAi agent additionally has two phosphorothioate internucleotide linkages between the terminal three nucleotides at both the 5′-end of the sense strand and at the 5′-end of the antisense strand. In one embodiment, every nucleotide in the sense strand and the antisense strand of the RNAi agent, including the nucleotides that are part of the motifs are modified nucleotides. In one embodiment each residue is independently modified with a 2′—O-methyl or 2′-fluoro, e.g., in an alternating motif. Optionally, the RNAi agent further comprises a ligand (e.g., a lipophilic ligand, optionally a C16 ligand).

[0295] In one embodiment, the RNAi agent comprises a sense and an antisense strand, wherein the sense strand is 25-30 nucleotide residues in length, wherein starting from the 5′ terminal nucleotide (position 1) positions 1 to 23 of the first strand comprise at least 8 ribonucleotides; the antisense strand is 36-66 nucleotide residues in length and, starting from the 3′ terminal nucleotide, comprises at least 8 ribonucleotides in the positions paired with positions 1-23 of sense strand to form a duplex; wherein at least the 3′ terminal nucleotide of antisense strand is unpaired with sense strand, and up to 6 consecutive 3′ terminal nucleotides are unpaired with sense strand, thereby forming a 3′ single stranded overhang of 1-6 nucleotides; wherein the 5′ terminus of antisense strand comprises from 10-30 consecutive nucleotides which are unpaired with sense strand, thereby forming a 10-30 nucleotide single stranded 5′ overhang; wherein at least the sense strand 5′ terminal and 3′ terminal nucleotides are base paired with nucleotides of antisense strand when sense and antisense strands are aligned for maximum complementarity, thereby forming a substantially duplexed region between sense and antisense strands; and antisense strand is sufficiently complementary to a target RNA along at least 19 ribonucleotides of antisense strand length to reduce target gene expression when the double stranded nucleic acid is introduced into a mammalian cell; and wherein the sense strand contains at least one motif of three 2′-F modifications on three consecutive nucleotides, where at least one of the motifs occurs at or near the cleavage site. The antisense strand contains at least one motif of three 2′-O-methyl modifications on three consecutive nucleotides at or near the cleavage site.

[0296] In one embodiment, the RNAi agent comprises sense and antisense strands, wherein the RNAi agent comprises a first strand having a length which is at least 25 and at most 29 nucleotides and a second strand having a length which is at most 30 nucleotides with at least one motif of three 2′-O-methyl modifications on three consecutive nucleotides at position 11, 12, and 13 from the 5′ end; wherein the 3′ end of the first strand and the 5′ end of the second strand form a blunt end and the second strand is 1-4 nucleotides longer at its 3′ end than the first strand, wherein the duplex region region which is at least 25 nucleotides in length, and the second strand is sufficiently complementary to a target mRNA along at least 19 nucleotide of the second strand length to reduce target gene expression when the RNAi agent is introduced into a mammalian cell, and wherein dicer cleavage of the RNAi agent results in an siRNA comprising the 3′ end of the second strand, thereby reducing expression of the target gene in the mammal. Optionally, the RNAi agent further comprises a ligand.

[0297] In one embodiment, the sense strand of the RNAi agent contains at least one motif of three identical modifications on three consecutive nucleotides, where one of the motifs occurs at the cleavage site in the sense strand.

[0298] In one embodiment, the antisense strand of the RNAi agent can also contain at least one motif of three identical modifications on three consecutive nucleotides, where one of the motifs occurs at or near the cleavage site in the antisense strand.

[0299] For an RNAi agent having a duplex region of 17-23 nucleotide in length, the cleavage site of the antisense strand is typically around the 10, 11 and 12 positions from the 5′-end. Thus the motifs of three identical modifications may occur at the 9, 10, and 11 positions; 10, 11, and 12 positions; 11, 12, and 13 positions; 12, 13, and 14 positions; or 13, 14, and 15 positions of the antisense strand, the count starting from the first nucleotide from the 5′-end of the antisense strand, or, the count starting from the first paired nucleotide within the duplex region from the 5′-end of the antisense strand. The cleavage site in the antisense strand may also change according to the length of the duplex region of the RNAi from the 5′-end.

[0300] The sense strand of the RNAi agent may contain at least one motif of three identical modifications on three consecutive nucleotides at the cleavage site of the strand; and the antisense strand may have at least one motif of three identical modifications on three consecutive nucleotides at or near the cleavage site of the strand. When the sense strand and the antisense strand form a dsRNA duplex, the sense strand and the antisense strand can be so aligned that one motif of the three nucleotides on the sense strand and one motif of the three nucleotides on the antisense strand have at least one nucleotide overlap, i.e., at least one of the three nucleotides of the motif in the sense strand forms a base pair with at least one of the three nucleotides of the motif in the antisense strand. Alternatively, at least two nucleotides may overlap, or all three nucleotides may overlap.

[0301] In one embodiment, the sense strand of the RNAi agent may contain more than one motif of three identical modifications on three consecutive nucleotides. The first motif may occur at or near the cleavage site of the strand and the other motifs may be a wing modification. The term “wing modification” herein refers to a motif occurring at another portion of the strand that is separated from the motif at or near the cleavage site of the same strand. The wing modification is either adajacent to the first motif or is separated by at least one or more nucleotides. When the motifs are immediately adjacent to each other then the chemistry of the motifs are distinct from each other and when the motifs are separated by one or more nucleotide than the chemistries can be the same or different. Two or more wing modifications may be present. For instance, when two wing modifications are present, each wing modification may occur at one end relative to the first motif which is at or near cleavage site or on either side of the lead motif.

[0302] Like the sense strand, the antisense strand of the RNAi agent may contain more than one motif of three identical modifications on three consecutive nucleotides, with at least one of the motifs occurring at or near the cleavage site of the strand. This antisense strand may also contain one or more wing modifications in an alignment similar to the wing modifications that may be present on the sense strand.

[0303] In one embodiment, the wing modification on the sense strand or antisense strand of the RNAi agent typically does not include the first one or two terminal nucleotides at the 3′-end, 5′-end or both ends of the strand.

[0304] In another embodiment, the wing modification on the sense strand or antisense strand of the RNAi agent typically does not include the first one or two paired nucleotides within the duplex region at the 3′-end, 5′-end or both ends of the strand.

[0305] When the sense strand and the antisense strand of the RNAi agent each contain at least one wing modification, the wing modifications may fall on the same end of the duplex region, and have an overlap of one, two or three nucleotides.

[0306] When the sense strand and the antisense strand of the RNAi agent each contain at least two wing modifications, the sense strand and the antisense strand can be so aligned that two modifications each from one strand fall on one end of the duplex region, having an overlap of one, two or three nucleotides; two modifications each from one strand fall on the other end of the duplex region, having an overlap of one, two or three nucleotides; two modifications one strand fall on each side of the lead motif, having an overlap of one, two, or three nucleotides in the duplex region.

[0307] In one embodiment, the RNAi agent comprises mismatch(es) with the target, within the duplex, or combinations thereof. The mismatch may occur in the overhang region or the duplex region. The base pair may be ranked on the basis of their propensity to promote dissociation or melting (e.g., on the free energy of association or dissociation of a particular pairing, the simplest approach is to examine the pairs on an individual pair basis, though next neighbor or similar analysis can also be used). In terms of promoting dissociation: A:U is preferred over G:C; G:U is preferred over G:C; and I:C is preferred over G:C (I=inosine). Mismatches, e.g., non-canonical or other than canonical pairings (as described elsewhere herein) are preferred over canonical (A:T, A:U, G:C) pairings; and pairings which include a universal base are preferred over canonical pairings.

[0308] In one embodiment, the RNAi agent comprises at least one of the first 1, 2, 3, 4, or 5 base pairs within the duplex regions from the 5′-end of the antisense strand independently selected from the group of: A:U, G:U, I:C, and mismatched pairs, e.g., non-canonical or other than canonical pairings or pairings which include a universal base, to promote the dissociation of the antisense strand at the 5′-end of the duplex.

[0309] In one embodiment, the nucleotide at the 1 position within the duplex region from the 5′-end in the antisense strand is selected from the group consisting of A, dA, dU, U, and dT. Alternatively, at least one of the first 1, 2 or 3 base pair within the duplex region from the 5′-end of the antisense strand is an AU base pair. For example, the first base pair within the duplex region from the 5′-end of the antisense strand is an AU base pair.

[0310] In another embodiment, the nucleotide at the 3′-end of the sense strand is deoxythimidine (dT). In another embodiment, the nucleotide at the 3′-end of the antisense strand is deoxythimidine (dT). In one embodiment, there is a short sequence of deoxythimidine nucleotides, for example, two dT nucleotides on the 3′-end of the sense or antisense strand.

[0311] In one embodiment, the sense strand sequence may be represented by formula (I):

5′nₚ-Nₐ-(X X X)ᵢ-N_{b}-Y Y Y-N_{b}-(Z Z Z)ⱼ-Nₐ-n_{q}3′ (I)
[0312] wherein:
[0313] i and j are each independently 0 or 1;
[0314] p and q are each independently 0-6;
[0315] each Nₐ independently represents an oligonucleotide sequence comprising 0-25 modified nucleotides, each sequence comprising at least two differently modified nucleotides;
[0316] each N_{b} independently represents an oligonucleotide sequence comprising 0-10 modified nucleotides;
[0317] each nₚ and n_{q} independently represent an overhang nucleotide;
[0318] wherein N_{b} and Y do not have the same modification; and
[0319] XXX, YYY and ZZZ each independently represent one motif of three identical modifications on three consecutive nucleotides. In one embodiment, YYY is all 2′-F modified nucleotides.

[0320] In one embodiment, the Nₐ or N_{b} comprise modifications of alternating pattern.

[0321] In one embodiment, the YYY motif occurs at or near the cleavage site of the sense strand. For example, when the RNAi agent has a duplex region of 17-23 nucleotides in length, the YYY motif can occur at or the vicinity of the cleavage site (e.g.: can occur at positions 6, 7, 8, 7, 8, 9, 8, 9, 10, 9, 10, 11, 10, 11, 12 or 11, 12, 13) of—the sense strand, the count starting from the 1″ nucleotide, from the 5′-end; or optionally, the count starting at the 1^{st} paired nucleotide within the duplex region, from the 5′-end.

[0322] In one embodiment, i is 1 and j is 0, or i is 0 and j is 1, or both i and j are 1. The sense strand can therefore be represented by the following formulas:

5′nₚ-Nₐ-YYY—N_{b}-ZZZ—Nₐ-n_{q}3′ (Ib);

5′nₚ-Nₐ-XXX—N_{b}-YYY—Nₐ-n_{q}3′ (Ic); or

5′nₚ-Nₐ-XXX—N_{b}-YYY—N_{b}-ZZZ—Nₐ-n_{q}3′ (Id).

[0323] When the sense strand is represented by formula (Ib), N_{b} represents an oligonucleotide sequence comprising 0-10, 0-7, 0-5, 0-4, 0-2 or 0 modified nucleotides.

[0324] Each Nₐ independently can represent an oligonucleotide sequence comprising 2-20, 2-15, or 2-10 modified nucleotides.

[0325] When the sense strand is represented as formula (Ic), N_{b} represents an oligonucleotide sequence comprising 0-10, 0-7, 0-10, 0-7, 0-5, 0-4, 0-2 or 0 modified nucleotides. Each Nₐ can independently represent an oligonucleotide sequence comprising 2-20, 2-15, or 2-10 modified nucleotides.

[0326] When the sense strand is represented as formula (Id), each N_{b} independently represents an oligonucleotide sequence comprising 0-10, 0-7, 0-5, 0-4, 0-2 or 0 modified nucleotides. In one embodiment, N_{b} is 0, 1, 2, 3, 4, 5 or 6. Each Nₐ can independently represent an oligonucleotide sequence comprising 2-20, 2-15, or 2-10 modified nucleotides.

[0327] Each of X, Y and Z may be the same or different from each other.

[0328] In other embodiments, i is 0 and j is 0, and the sense strand may be represented by the formula:

5′nₚ-Nₐ-YYY-Nₐ-n_{q}3′ (Ia).

[0329] When the sense strand is represented by formula (Ia), each Nₐ independently can represent an oligonucleotide sequence comprising 2-20, 2-15, or 2-10 modified nucleotides.

[0330] In one embodiment, the antisense strand sequence of the RNAi may be represented by formula (II):

5′n_{q}′-Nₐ′-(Z′Z′Z′)ₖ-N_{b}′-Y′Y′Y′-N_{b}′-(X′X′X′)ₗ-N′ₐ-nₚ′3′ (II)
[0331] wherein:
[0332] k and l are each independently 0 or 1;
[0333] p′ and q′ are each independently 0-6;
   each Nₐ′ independently represents an oligonucleotide sequence comprising 0-25 modified nucleotides,
   each sequence comprising at least two differently modified nucleotides;
   each N_{b}′ independently represents an oligonucleotide sequence comprising 0-10 modified nucleotides;

[0334] each nₚ′ and n_{q}′ independently represent an overhang nucleotide;

wherein N_{b}′ and Y′ do not have the same modification; and
X′X′X′, Y′Y′Y′ and Z′Z′Z′each independently represent one motif of three identical modifications on three consecutive nucleotides.

[0335] In one embodiment, the Nₐ′ or N_{b}′ comprise modifications of alternating pattern.

[0336] The Y′Y′Y′ motif occurs at or near the cleavage site of the antisense strand. For example, when the RNAi agent has a duplex region of 17-23 nucleotide in length, the Y′Y′Y′ motif can occur at positions 9, 10, 11; 10, 11, 12; 11, 12, 13; 12, 13, 14; or 13, 14, 15 of the antisense strand, with the count starting from the 1″ nucleotide, from the 5′-end; or optionally, the count starting at the 1″ paired nucleotide within the duplex region, from the 5′-end. In one embodiment, the Y′Y′Y′ motif occurs at positions 11, 12, 13.

[0337] In one embodiment, Y′Y′Y′ motif is all 2′-OMe modified nucleotides.

[0338] In one embodiment, k is 1 and l is 0, or k is 0 and 1 is 1, or both k and l are 1.

[0339] The antisense strand can therefore be represented by the following formulas:

5′n_{q}′-Nₐ′-Z′Z′Z′-N_{b}′-Y′Y′Y′-Nₐ′-nₚ,3′ (IIb);

5′n_{q}′-Nₐ′-Y′Y′Y′-N_{b}′-X′X′X′-nₚ,3′ (IIc); or

5′n_{q}′-Nₐ′-Z′Z′Z′-N_{b}′-Y′Y′Y′-N_{b}′-X′X′X′-Nₐ′-nₚ′3′ (IId).

[0340] When the antisense strand is represented by formula (IIb), N_{b}′ represents an oligonucleotide sequence comprising 0-10, 0-7, 0-10, 0-7, 0-5, 0-4, 0-2 or 0 modified nucleotides. Each Nₐ′ independently represents an oligonucleotide sequence comprising 2-20, 2-15, or 2-10 modified nucleotides.

[0341] When the antisense strand is represented as formula (IIc), N_{b}′ represents an oligonucleotide sequence comprising 0-10, 0-7, 0-10, 0-7, 0-5, 0-4, 0-2 or 0 modified nucleotides. Each Nₐ′ independently represents an oligonucleotide sequence comprising 2-20, 2-15, or 2-10 modified nucleotides.

[0342] When the antisense strand is represented as formula (IId), each N_{b}′ independently represents an oligonucleotide sequence comprising 0-10, 0-7, 0-10, 0-7, 0-5, 0-4, 0-2 or 0 modified nucleotides. Each Nₐ′ independently represents an oligonucleotide sequence comprising 2-20, 2-15, or 2-10 modified nucleotides. In one embodiment, N_{b} is 0, 1, 2, 3, 4, 5 or 6.

[0343] In other embodiments, k is 0 and 1 is 0 and the antisense strand may be represented by the formula:

5′n_{p′}-Nₐ-Y′Y′Y′-Nₐ-n_{q},3′ (Ia).

[0344] When the antisense strand is represented as formula (IIa), each Nₐ′ independently represents an oligonucleotide sequence comprising 2-20, 2-15, or 2-10 modified nucleotides.

[0345] Each of X′, Y′ and Z′ may be the same or different from each other.

[0346] Each nucleotide of the sense strand and antisense strand may be independently modified with LNA, glycol nucleic acid (GNA), hexitol nucleic acid (HNA), 2′-methoxyethyl, 2′-O-methyl, 2′-O-allyl, 2′-C-allyl, 2′-hydroxyl, or 2′-fluoro. For example, each nucleotide of the sense strand and antisense strand is independently modified with 2′-O-methyl or 2′-fluoro. Each X, Y, Z, X′, Y′ and Z′, in particular, may represent a 2′-O-methyl modification or a 2′-fluoro modification.

[0347] In one embodiment, the sense strand of the RNAi agent may contain YYY motif occurring at 9, 10 and 11 positions of the strand when the duplex region is 21 nt, the count starting from the 1^{st} nucleotide from the 5′-end, or optionally, the count starting at the 1″ paired nucleotide within the duplex region, from the 5′-end; and Y represents 2′-F modification. The sense strand may additionally contain XXX motif or ZZZ motifs as wing modifications at the opposite end of the duplex region; and XXX and ZZZ each independently represents a 2′-OMe modification or 2′-F modification.

[0348] In one embodiment the antisense strand may contain Y′Y′Y′ motif occurring at positions 11, 12, 13 of the strand, the count starting from the 1″ nucleotide from the 5′-end, or optionally, the count starting at the 1″ paired nucleotide within the duplex region, from the 5′-end; and Y′ represents 2′-O-methyl modification. The antisense strand may additionally contain X′X′X′ motif or Z′Z′Z′ motifs as wing modifications at the opposite end of the duplex region; and X′X′X′ and Z′Z′Z′ each independently represents a 2′-OMe modification or 2′-F modification.

[0349] The sense strand represented by any one of the above formulas (Ia), (Ib), (Ic), and (Id) forms a duplex with a antisense strand being represented by any one of formulas (IIa), (IIb), (IIc), and (IId), respectively.

[0350] Accordingly, the RNAi agents for use in the methods of the disclosure may comprise a sense strand and an antisense strand, each strand having 14 to 30 nucleotides, the RNAi duplex represented by formula (III):

sense: 5′nₚ-Nₐ-(X X X)ᵢ-N_{b}-Y Y Y-N_{b}-(Z Z Z)ⱼ-Nₐ-n_{q}3′

antisense: 3′nₚ′-Nₐ′-(X′X′X′)ₖ-N_{b}′-Y′Y′Y′-N_{b}′-(Z′Z′Z′)ₗNₐ′-n_{q}′5′ (III)
[0351] wherein:
[0352] i, j, k, and 1 are each independently 0 or 1;
[0353] p, p′, q, and q′ are each independently 0-6;
[0354] each Nₐ and Nₐ′ independently represents an oligonucleotide sequence comprising 0-25 modified nucleotides, each sequence comprising at least two differently modified nucleotides;
[0355] each N_{b} and N_{b}′ independently represents an oligonucleotide sequence comprising 0-10 modified nucleotides;
[0356] wherein
[0357] each nₚ′, nₚ, n_{q}′, and n_{q}, each of which may or may not be present, independently represents an overhang nucleotide; and
[0358] XXX, YYY, ZZZ, X′X′X′, Y′Y′Y′, and Z′Z′Z′ each independently represent one motif of three identical modifications on three consecutive nucleotides.

[0359] In one embodiment, i is 0 and j is 0; or i is 1 and j is 0; or i is 0 and j is 1; or both i and j are 0; or both i and j are 1. In another embodiment, k is 0 and l is 0; or k is 1 and l is 0; k is 0 and 1 is 1; or both k and 1 are 0; or both k and 1 are 1.

[0360] Exemplary combinations of the sense strand and antisense strand forming a RNAi duplex include the formulas below:

5′nₚ-Nₐ-Y Y Y-Nₐ-n_{q}3′

3′nₚ′-Nₐ′-Y′Y′Y′-Nₐ′n_{q}′5′ (IIIa)

5′nₚ-Nₐ-Y Y Y-N_{b}-Z Z Z-Nₐ-n_{q}3′

3′nₚ′-Nₐ′-Y′Y′Y′-N_{b}′-Z′Z′Z′-Nₐ′n_{q}′5′ (IIIb)

5′nₚ-Nₐ-X X X-N_{b}-Y Y Y-Nₐ-n_{q}3′

3′nₚ′-Nₐ′-X′X′X′-N_{b}′-Y′Y′Y′-Nₐ′-n_{q}′5′(IIc)

5′nₚ-Nₐ-X X X-N_{b}-Y Y Y-N_{b}-Z Z Z-Nₐ-n_{q}3′

3′nₚ′-Nₐ′-X′X′X′-N_{b}′-Y′Y′Y′-N_{b}′-Z′Z′Z′-Nₐ-n_{q}′5′ (IIId)

[0361] When the RNAi agent is represented by formula (IIIa), each Nₐ independently represents an oligonucleotide sequence comprising 2-20, 2-15, or 2-10 modified nucleotides.

[0362] When the RNAi agent is represented by formula (IIIb), each N_{b} independently represents an oligonucleotide sequence comprising 1-10, 1-7, 1-5 or 1-4 modified nucleotides. Each Nₐ independently represents an oligonucleotide sequence comprising 2-20, 2-15, or 2-10 modified nucleotides.

[0363] When the RNAi agent is represented as formula (IIIc), each N_{b}, N_{b}′ independently represents an oligonucleotide sequence comprising 0-10, 0-7, 0-10, 0-7, 0-5, 0-4, 0-2 or 0 modified nucleotides.

[0364] Each Nₐ independently represents an oligonucleotide sequence comprising 2-20, 2-15, or 2-10 modified nucleotides.

[0365] When the RNAi agent is represented as formula (IIId), each N_{b}, N_{b}′ independently represents an oligonucleotide sequence comprising 0-10, 0-7, 0-10, 0-7, 0-5, 0-4, 0-2 or 0 modified nucleotides. Each Nₐ, Nₐ′ independently represents an oligonucleotide sequence comprising 2-20, 2-15, or 2-10 modified nucleotides. Each of Nₐ, Nₐ′, N_{b} and N_{b}′ independently comprises modifications of alternating pattern.

[0366] In one embodiment, when the RNAi agent is represented by formula (IIId), the Nₐ modifications are 2′-O-methyl or 2′-fluoro modifications. In another embodiment, when the RNAi agent is represented by formula (IIId), the Nₐ modifications are 2′-O-methyl or 2′-fluoro modifications and nₚ′>0 and at least one nₚ′ is linked to a neighboring nucleotide a via phosphorothioate linkage. In yet another embodiment, when the RNAi agent is represented by formula (IIId), the Nₐ modifications are 2′-O-methyl or 2′-fluoro modifications, nₚ′>0 and at least one nₚ′ is linked to a neighboring nucleotide via phosphorothioate linkage, and the sense strand is conjugated to one or more C16 (or related) moieties attached through a bivalent or trivalent branched linker (described below). In another embodiment, when the RNAi agent is represented by formula (IIId), the Nₐ modifications are 2′-O-methyl or 2′-fluoro modifications, nₚ′>0 and at least one nₚ′ is linked to a neighboring nucleotide via phosphorothioate linkage, the sense strand comprises at least one phosphorothioate linkage, and the sense strand is conjugated to one or more lipophilic, e.g., C16 (or related) moieties, optionally attached through a bivalent or trivalent branched linker.

[0367] In one embodiment, when the RNAi agent is represented by formula (IIIa), the Nₐ modifications are 2′-O-methyl or 2′-fluoro modifications, nₚ′>0 and at least one nₚ′ is linked to a neighboring nucleotide via phosphorothioate linkage, the sense strand comprises at least one phosphorothioate linkage, and the sense strand is conjugated to one or more lipophilic, e.g., C16 (or related) moieties attached through a bivalent or trivalent branched linker.

[0368] In one embodiment, the RNAi agent is a multimer containing at least two duplexes represented by formula (III), (IIIa), (IIIb), (IIc), and (IIId), wherein the duplexes are connected by a linker. The linker can be cleavable or non-cleavable. Optionally, the multimer further comprises a ligand. Each of the duplexes can target the same gene or two different genes; or each of the duplexes can target same gene at two different target sites.

[0369] In one embodiment, the RNAi agent is a multimer containing three, four, five, six or more duplexes represented by formula (III), (IIIa), (IIIb), (IIc), and (1 IId), wherein the duplexes are connected by a linker. The linker can be cleavable or non-cleavable. Optionally, the multimer further comprises a ligand. Each of the duplexes can target the same gene or two different genes; or each of the duplexes can target same gene at two different target sites.

[0370] In one embodiment, two RNAi agents represented by formula (III), (IIIa), (IIIb), (IIc), and (IIId) are linked to each other at the 5′ end, and one or both of the 3′ ends and are optionally conjugated to to a ligand. Each of the agents can target the same gene or two different genes; or each of the agents can target same gene at two different target sites.

[0371] Various publications describe multimeric RNAi agents that can be used in the methods of the disclosure. Such publications include WO2007/091269, WO2010/141511, WO2007/117686, WO2009/014887, and WO2011/031520; and U.S. Pat. No. 7,858,769, the entire contents of each of which are hereby incorporated herein by reference.

[0372] In certain embodiments, the compositions and methods of the disclosure include a vinyl phosphonate (VP) modification of an RNAi agent as described herein. In exemplary embodiments, a 5′-vinyl phosphonate modified nucleotide of the disclosure has the structure:

[chemical structure]

wherein X is O or S;
[0373] R is hydrogen, hydroxy, fluoro, or C₁₋₂₀alkoxy (e.g., methoxy or n-hexadecyloxy);
[0374] R^{5′} is ═C(H)—P(O)(OH)₂ and the double bond between the C5′ carbon and R^{5′} is in the E or Z orientation (e.g., E orientation); and
[0375] B is a nucleobase or a modified nucleobase, optionally where B is adenine, guanine, cytosine, thymine, or uracil.

[0376] A vinyl phosphonate of the instant disclosure may be attached to either the antisense or the sense strand of a dsRNA of the disclosure. In certain embodiments, a vinyl phosphonate of the instant disclosure is attached to the antisense strand of a dsRNA, optionally at the 5′ end of the antisense strand of the dsRNA.

[0377] Vinyl phosphonate modifications are also contemplated for the compositions and methods of the instant disclosure. An exemplary vinyl phosphonate structure includes the preceding structure, where R5′ is ═C(H)—OP(O)(OH)2 and the double bond between the C5′ carbon and R5′ is in the E or Z orientation (e.g., E orientation).

[0378] E. Thermally Destabilizing Modifications

[0379] In certain embodiments, a dsRNA molecule can be optimized for RNA interference by incorporating thermally destabilizing modifications in the seed region of the antisense strand (i.e., at positions 2-9 of the 5′-end of the antisense strand or at positions 2-8 of the 5′-end of the antisense strand) to reduce or inhibit off-target gene silencing.

[0380] The term “thermally destabilizing modification(s)” includes modification(s) that would result with a dsRNA with a lower overall melting temperature (Tm) than the Tm of the dsRNA without having such modification(s). For example, the thermally destabilizing modification(s) can decrease the Tm of the dsRNA by 1-4° C., such as one, two, three or four degrees Celcius. And, the term “thermally destabilizing nucleotide” refers to a nucleotide containing one or more thermally destabilizing modifications.

[0381] It has been discovered that dsRNAs with an antisense strand comprising at least one thermally destabilizing modification of the duplex within the first 9 nucleotide positions, counting from the 5′ end, of the antisense strand have reduced off-target gene silencing activity. Accordingly, in some embodiments, the antisense strand comprises at least one (e.g., one, two, three, four, five or more) thermally destabilizing modification of the duplex within the first 9 nucleotide positions of the 5′ region of the antisense strand. In some embodiments, one or more thermally destabilizing modification(s) of the duplex is/are located in positions 2-9, such as positions 4-8, from the 5′-end of the antisense strand. In some further embodiments, the thermally destabilizing modification(s) of the duplex is/are located at position 6, 7 or 8 from the 5′-end of the antisense strand. In still some further embodiments, the thermally destabilizing modification of the duplex is located at position 7 from the 5′-end of the antisense strand. In some embodiments, the thermally destabilizing modification of the duplex is located at position 2, 3, 4, 5 or 9 from the 5′-end of the antisense strand.

[0382] The thermally destabilizing modifications can include, but are not limited to, abasic modification; mismatch with the opposing nucleotide in the opposing strand; and sugar modification such as 2′-deoxy modification or acyclic nucleotide, e.g., unlocked nucleic acids (UNA) or glycol nucleic acid (GNA).

[0383] Exemplified abasic modifications include, but are not limited to the following:

[chemical structure]

[0384] Wherein R═H, Me, Et or OMe; R′═H, Me, Et or OMe; R″=H, Me, Et or OMe

[chemical structure]

wherein B is a modified or unmodified nucleobase.

[0385] Exemplified sugar modifications include, but are not limited to the following:

[chemical structure]

wherein B is a modified or unmodified nucleobase.

[0386] In some embodiments the thermally destabilizing modification of the duplex is selected from the group consisting of:

[chemical structure]

wherein B is a modified or unmodified nucleobase and the asterisk on each structure represents either R, S or racemic.

[0387] The term “acyclic nucleotide” refers to any nucleotide having an acyclic ribose sugar, for example, where any of bonds between the ribose carbons (e.g., C1′-C2′, C2′-C3′, C3′-C4′, C4′-O4′, or C1′-O4′) is absent or at least one of ribose carbons or oxygen (e.g., C1′, C2′, C3′, C4′, or O4′) are independently or in combination absent from the nucleotide. In some embodiments, acyclic nucleotide

[chemical structure]

wherein B is a modified or unmodified nucleobase, R¹ and R² independently are H, halogen, OR₃, or alkyl; and R₃ is H, alkyl, cycloalkyl, aryl, aralkyl, heteroaryl or sugar). The term “UNA” refers to unlocked acyclic nucleic acid, wherein any of the bonds of the sugar has been removed, forming an unlocked “sugar” residue. In one example, UNA also encompasses monomers with bonds between C1′-C4′ being removed (i.e. the covalent carbon-oxygen-carbon bond between the C1′ and C4′ carbons). In another example, the C2′-C3′ bond (i.e. the covalent carbon-carbon bond between the C2′ and C3′ carbons) of the sugar is removed (see Mikhailov et. al., Tetrahedron Letters, 26 (17): 2059 (1985); and Fluiter et al., Mol. Biosyst., 10: 1039 (2009), which are hereby incorporated by reference in their entirety). The acyclic derivative provides greater backbone flexibility without affecting the Watson-Crick pairings. The acyclic nucleotide can be linked via 2′-5′ or 3′-5′ linkage.

[0388] The term ‘GNA’ refers to glycol nucleic acid which is a polymer similar to DNA or RNA but differing in the composition of its “backbone” in that is composed of repeating glycerol units linked by phosphodiester bonds:

[chemical structure]

[0389] The thermally destabilizing modification of the duplex can be mismatches (i.e., noncomplementary base pairs) between the thermally destabilizing nucleotide and the opposing nucleotide in the opposite strand within the dsRNA duplex. Exemplary mismatch base pairs include G:G, G:A, G:U, G:T, A:A, A:C, C:C, C:U, C:T, U:U, T:T, U:T, or a combination thereof. Other mismatch base pairings known in the art are also amenable to the present invention. A mismatch can occur between nucleotides that are either naturally occurring nucleotides or modified nucleotides, i.e., the mismatch base pairing can occur between the nucleobases from respective nucleotides independent of the modifications on the ribose sugars of the nucleotides. In certain embodiments, the dsRNA molecule contains at least one nucleobase in the mismatch pairing that is a 2′-deoxy nucleobase; e.g., the 2′-deoxy nucleobase is in the sense strand.

[0390] In some embodiments, the thermally destabilizing modification of the duplex in the seed region of the antisense strand includes nucleotides with impaired Watson-Crick hydrogen-bonding W-C H-bonding to the complementary base on the target mRNA, such as modified nucleobases:

[chemical structure]

[0391] More examples of abasic nucleotide, acyclic nucleotide modifications (including UNA and GNA), and mismatch modifications have been described in detail in WO 2011/133876, which is herein incorporated by reference in its entirety.

[0392] The thermally destabilizing modifications may also include universal base with reduced or abolished capability to form hydrogen bonds with the opposing bases, and phosphate modifications.

[0393] In some embodiments, the thermally destabilizing modification of the duplex includes nucleotides with non-canonical bases such as, but not limited to, nucleobase modifications with impaired or completely abolished capability to form hydrogen bonds with bases in the opposite strand. These nucleobase modifications have been evaluated for destabilization of the central region of the dsRNA duplex as described in WO 2010/0011895, which is herein incorporated by reference in its entirety. Exemplary nucleobase modifications are:

[chemical structure]

[0394] In some embodiments, the thermally destabilizing modification of the duplex in the seed region of the antisense strand includes one or more α-nucleotide complementary to the base on the target mRNA, such as:

[chemical structure]

wherein R is H, OH, OCH₃, F, NH₂, NHMe, NMe₂ or O-alkyl.

[0395] Exemplary phosphate modifications known to decrease the thermal stability of dsRNA duplexes compared to natural phosphodiester linkages are:

[chemical structure]

[0396] The alkyl for the R group can be a C₁-C₆alkyl. Specific alkyls for the R group include, but are not limited to methyl, ethyl, propyl, isopropyl, butyl, pentyl and hexyl.

[0397] As the skilled artisan will recognize, in view of the functional role of nucleobases is defining specificity of a RNAi agent of the disclosure, while nucleobase modifications can be performed in the various manners as described herein, e.g., to introduce destabilizing modifications into a RNAi agent of the disclosure, e.g., for purpose of enhancing on-target effect relative to off-target effect, the range of modifications available and, in general, present upon RNAi agents of the disclosure tends to be much greater for non-nucleobase modifications, e.g., modifications to sugar groups or phosphate backbones of polyribonucleotides. Such modifications are described in greater detail in other sections of the instant disclosure and are expressly contemplated for RNAi agents of the disclosure, either possessing native nucleobases or modified nucleobases as described above or elsewhere herein.

[0398] In addition to the antisense strand comprising a thermally destabilizing modification, the dsRNA can also comprise one or more stabilizing modifications. For example, the dsRNA can comprise at least two (e.g., two, three, four, five, six, seven, eight, nine, ten or more) stabilizing modifications. Without limitations, the stabilizing modifications all can be present in one strand. In some embodiments, both the sense and the antisense strands comprise at least two stabilizing modifications. The stabilizing modification can occur on any nucleotide of the sense strand or antisense strand. For instance, the stabilizing modification can occur on every nucleotide on the sense strand or antisense strand; each stabilizing modification can occur in an alternating pattern on the sense strand or antisense strand; or the sense strand or antisense strand comprises both stabilizing modification in an alternating pattern. The alternating pattern of the stabilizing modifications on the sense strand may be the same or different from the antisense strand, and the alternating pattern of the stabilizing modifications on the sense strand can have a shift relative to the alternating pattern of the stabilizing modifications on the antisense strand.

[0399] In some embodiments, the antisense strand comprises at least two (e.g., two, three, four, five, six, seven, eight, nine, ten or more) stabilizing modifications. Without limitations, a stabilizing modification in the antisense strand can be present at any positions. In some embodiments, the antisense comprises stabilizing modifications at positions 2, 6, 8, 9, 14, and 16 from the 5′-end. In some other embodiments, the antisense comprises stabilizing modifications at positions 2, 6, 14, and 16 from the 5′-end. In still some other embodiments, the antisense comprises stabilizing modifications at positions 2, 14, and 16 from the 5′-end.

[0400] In some embodiments, the antisense strand comprises at least one stabilizing modification adjacent to the destabilizing modification. For example, the stabilizing modification can be the nucleotide at the 5′-end or the 3′-end of the destabilizing modification, i.e., at position −1 or +1 from the position of the destabilizing modification. In some embodiments, the antisense strand comprises a stabilizing modification at each of the 5′-end and the 3′-end of the destabilizing modification, i.e., positions −1 and +1 from the position of the destabilizing modification.

[0401] In some embodiments, the antisense strand comprises at least two stabilizing modifications at the 3′-end of the destabilizing modification, i.e., at positions+1 and +2 from the position of the destabilizing modification.

[0402] In some embodiments, the sense strand comprises at least two (e.g., two, three, four, five, six, seven, eight, nine, ten or more) stabilizing modifications. Without limitations, a stabilizing modification in the sense strand can be present at any positions. In some embodiments, the sense strand comprises stabilizing modifications at positions 7, 10, and 11 from the 5′-end. In some other embodiments, the sense strand comprises stabilizing modifications at positions 7, 9, 10, and 11 from the 5′-end. In some embodiments, the sense strand comprises stabilizing modifications at positions opposite or complimentary to positions 11, 12, and 15 of the antisense strand, counting from the 5′-end of the antisense strand. In some other embodiments, the sense strand comprises stabilizing modifications at positions opposite or complimentary to positions 11, 12, 13, and 15 of the antisense strand, counting from the 5′-end of the antisense strand. In some embodiments, the sense strand comprises a block of two, three, or four stabilizing modifications.

[0403] In some embodiments, the sense strand does not comprise a stabilizing modification in position opposite or complimentary to the thermally destabilizing modification of the duplex in the antisense strand.

[0404] Exemplary thermally stabilizing modifications include, but are not limited to, 2′-fluoro modifications. Other thermally stabilizing modifications include, but are not limited to, LNA.

[0405] In some embodiments, the dsRNA of the disclosure comprises at least four (e.g., four, five, six, seven, eight, nine, ten, or more) 2′-fluoro nucleotides. Without limitations, the 2′-fluoro nucleotides all can be present in one strand. In some embodiments, both the sense and the antisense strands comprise at least two 2′-fluoro nucleotides. The 2′-fluoro modification can occur on any nucleotide of the sense strand or antisense strand. For instance, the 2′-fluoro modification can occur on every nucleotide on the sense strand or antisense strand; each 2′-fluoro modification can occur in an alternating pattern on the sense strand or antisense strand; or the sense strand or antisense strand comprises both 2′-fluoro modifications in an alternating pattern. The alternating pattern of the 2′-fluoro modifications on the sense strand may be the same or different from the antisense strand, and the alternating pattern of the 2′-fluoro modifications on the sense strand can have a shift relative to the alternating pattern of the 2′-fluoro modifications on the antisense strand.

[0406] In some embodiments, the antisense strand comprises at least two (e.g., two, three, four, five, six, seven, eight, nine, ten, or more) 2′-fluoro nucleotides. Without limitations, a 2′-fluoro modification in the antisense strand can be present at any positions. In some embodiments, the antisense comprises 2′-fluoro nucleotides at positions 2, 6, 8, 9, 14, and 16 from the 5′-end. In some other embodiments, the antisense comprises 2′-fluoro nucleotides at positions 2, 6, 14, and 16 from the 5′-end. In still some other embodiments, the antisense comprises 2′-fluoro nucleotides at positions 2, 14, and 16 from the 5′-end.

[0407] In some embodiments, the antisense strand comprises at least one 2′-fluoro nucleotide adjacent to the destabilizing modification. For example, the 2′-fluoro nucleotide can be the nucleotide at the 5′-end or the 3′-end of the destabilizing modification, i.e., at position −1 or +1 from the position of the destabilizing modification. In some embodiments, the antisense strand comprises a 2′-fluoro nucleotide at each of the 5′-end and the 3′-end of the destabilizing modification, i.e., positions −1 and +1 from the position of the destabilizing modification.

[0408] In some embodiments, the antisense strand comprises at least two 2′-fluoro nucleotides at the 3′-end of the destabilizing modification, i.e., at positions+1 and +2 from the position of the destabilizing modification.

[0409] In some embodiments, the sense strand comprises at least two (e.g., two, three, four, five, six, seven, eight, nine, ten, or more) 2′-fluoro nucleotides. Without limitations, a 2′-fluoro modification in the sense strand can be present at any positions. In some embodiments, the antisense comprises 2′-fluoro nucleotides at positions 7, 10, and 11 from the 5′-end. In some other embodiments, the sense strand comprises 2′-fluoro nucleotides at positions 7, 9, 10, and 11 from the 5′-end. In some embodiments, the sense strand comprises 2′-fluoro nucleotides at positions opposite or complimentary to positions 11, 12, and 15 of the antisense strand, counting from the 5′-end of the antisense strand. In some other embodiments, the sense strand comprises 2′-fluoro nucleotides at positions opposite or complimentary to positions 11, 12, 13, and 15 of the antisense strand, counting from the 5′-end of the antisense strand. In some embodiments, the sense strand comprises a block of two, three or four 2′-fluoro nucleotides.

[0410] In some embodiments, the sense strand does not comprise a 2′-fluoro nucleotide in position opposite or complimentary to the thermally destabilizing modification of the duplex in the antisense strand.

[0411] In some embodiments, the dsRNA molecule of the disclosure comprises a 21 nucleotides (nt) sense strand and a 23 nucleotides (nt) antisense, wherein the antisense strand contains at least one thermally destabilizing nucleotide, where the at least one thermally destabilizing nucleotide occurs in the seed region of the antisense strand (i.e., at position 2-8 of the 5′-end of the antisense strand or at position 2-9 of the 5′-end of the antisense strand), wherein one end of the dsRNA is blunt, while the other end is comprises a 2 nt overhang, and wherein the dsRNA optionally further has at least one (e.g., one, two, three, four, five, six or all seven) of the following characteristics: (i) the antisense comprises 2, 3, 4, 5, or 6 2′-fluoro modifications; (ii) the antisense comprises 1, 2, 3, 4, or 5 phosphorothioate internucleotide linkages; (iii) the sense strand is conjugated with a ligand; (iv) the sense strand comprises 2, 3, 4, or 5 2′-fluoro modifications; (v) the sense strand comprises 1, 2, 3, 4, or 5 phosphorothioate internucleotide linkages; (vi) the dsRNA comprises at least four 2′-fluoro modifications; and (vii) the dsRNA comprises a blunt end at 5′-end of the antisense strand. in one embodiment, the two nucleotide overhang is at the 3′-end of the antisense.

[0412] In some embodiments, the dsRNA molecule of the disclosure comprising a sense and antisense strands, wherein: the sense strand is 25-30 nucleotide residues in length, wherein starting from the 5′ terminal nucleotide (position 1), positions 1 to 23 of said sense strand comprise at least 8 ribonucleotides; antisense strand is 36-66 nucleotide residues in length and, starting from the 3′ terminal nucleotide, at least 8 ribonucleotides in the positions paired with positions 1-23 of sense strand to form a duplex; wherein at least the 3′ terminal nucleotide of antisense strand is unpaired with sense strand, and up to 6 consecutive 3′ terminal nucleotides are unpaired with sense strand, thereby forming a 3′ single stranded overhang of 1-6 nucleotides; wherein the 5′ terminus of antisense strand comprises from 10-30 consecutive nucleotides which are unpaired with sense strand, thereby forming a 10-30 nucleotide single stranded 5′ overhang; wherein at least the sense strand 5′ terminal and 3′ terminal nucleotides are base paired with nucleotides of antisense strand when sense and antisense strands are aligned for maximum complementarity, thereby forming a substantially duplexed region between sense and antisense strands; and antisense strand is sufficiently complementary to a target RNA along at least 19 ribonucleotides of antisense strand length to reduce target gene expression when said double stranded nucleic acid is introduced into a mammalian cell; and wherein the antisense strand contains at least one thermally destabilizing nucleotide, where at least one thermally destabilizing nucleotide is in the seed region of the antisense strand (i.e. at position 2-8 of the 5′-end of the antisense strand or at position 2-9 of the 5′-end of the antisense strand). For example, the thermally destabilizing nucleotide occurs between positions opposite or complimentary to positions 14-17 of the 5′-end of the sense strand, and wherein the dsRNA optionally further has at least one (e.g., one, two, three, four, five, six or all seven) of the following characteristics: (i) the antisense comprises 2, 3, 4, 5, or 6 2′-fluoro modifications; (ii) the antisense comprises 1, 2, 3, 4, or 5 phosphorothioate internucleotide linkages; (iii) the sense strand is conjugated with a ligand; (iv) the sense strand comprises 2, 3, 4, or 5 2′-fluoro modifications; (v) the sense strand comprises 1, 2, 3, 4, or 5 phosphorothioate internucleotide linkages; and (vi) the dsRNA comprises at least four 2′-fluoro modifications; and (vii) the dsRNA comprises a duplex region of 12-30 nucleotide pairs in length.

[0413] In some embodiments, the dsRNA molecule of the disclosure comprises a sense and antisense strands, wherein said dsRNA molecule comprises a sense strand having a length which is at least 25 and at most 29 nucleotides and an antisense strand having a length which is at most 30 nucleotides with the sense strand comprises a modified nucleotide that is susceptible to enzymatic degradation at position 11 from the 5′end, wherein the 3′ end of said sense strand and the 5′ end of said antisense strand form a blunt end and said antisense strand is 1-4 nucleotides longer at its 3′ end than the sense strand, wherein the duplex region which is at least 25 nucleotides in length, and said antisense strand is sufficiently complementary to a target mRNA along at least 19 nt of said antisense strand length to reduce target gene expression when said dsRNA molecule is introduced into a mammalian cell, and wherein dicer cleavage of said dsRNA results in an siRNA comprising said 3′ end of said antisense strand, thereby reducing expression of the target gene in the mammal, wherein the antisense strand contains at least one thermally destabilizing nucleotide, where the at least one thermally destabilizing nucleotide is in the seed region of the antisense strand (i.e. at position 2-8 of the 5′-end of the antisense strand or at position 2-9 of the 5′-end of the antisense strand), and wherein the dsRNA optionally further has at least one (e.g., one, two, three, four, five, six or all seven) of the following characteristics: (i) the antisense comprises 2, 3, 4, 5, or 6 2′-fluoro modifications; (ii) the antisense comprises 1, 2, 3, 4, or 5 phosphorothioate internucleotide linkages; (iii) the sense strand is conjugated with a ligand; (iv) the sense strand comprises 2, 3, 4, or 5 2′-fluoro modifications; (v) the sense strand comprises 1, 2, 3, 4, or 5 phosphorothioate internucleotide linkages; and (vi) the dsRNA comprises at least four 2′-fluoro modifications; and (vii) the dsRNA has a duplex region of 12-29 nucleotide pairs in length.

[0414] In some embodiments, every nucleotide in the sense strand and antisense strand of the dsRNA molecule may be modified. Each nucleotide may be modified with the same or different modification which can include one or more alteration of one or both of the non-linking phosphate oxygens or of one or more of the linking phosphate oxygens; alteration of a constituent of the ribose sugar, e.g., of the 2′ hydroxyl on the ribose sugar; wholesale replacement of the phosphate moiety with “dephospho” linkers; modification or replacement of a naturally occurring base; and replacement or modification of the ribose-phosphate backbone.

[0415] As nucleic acids are polymers of subunits, many of the modifications occur at a position which is repeated within a nucleic acid, e.g., a modification of a base, or a phosphate moiety, or a non-linking O of a phosphate moiety. In some cases, the modification will occur at all of the subject positions in the nucleic acid but in many cases it will not. By way of example, a modification may only occur at a 3′ or 5′ terminal position, may only occur in a terminal region, e.g., at a position on a terminal nucleotide or in the last 2, 3, 4, 5, or 10 nucleotides of a strand. A modification may occur in a double strand region, a single strand region, or in both. A modification may occur only in the double strand region of an RNA or may only occur in a single strand region of an RNA. e.g., a phosphorothioate modification at a non-linking O position may only occur at one or both termini, may only occur in a terminal region, e.g., at a position on a terminal nucleotide or in the last 2, 3, 4, 5, or 10 nucleotides of a strand, or may occur in double strand and single strand regions, particularly at termini. The 5′ end or ends can be phosphorylated.

[0416] It may be possible, e.g., to enhance stability, to include particular bases in overhangs, or to include modified nucleotides or nucleotide surrogates, in single strand overhangs, e.g., in a 5′ or 3′ overhang, or in both. E.g., it can be desirable to include purine nucleotides in overhangs. In some embodiments all or some of the bases in a 3′ or 5′ overhang may be modified, e.g., with a modification described herein. Modifications can include, e.g., the use of modifications at the 2′ position of the ribose sugar with modifications that are known in the art, e.g., the use of deoxyribonucleotides, 2′-deoxy-2′-fluoro (2′-F) or 2′-O-methyl modified instead of the ribosugar of the nucleobase, and modifications in the phosphate group, e.g., phosphorothioate modifications. Overhangs need not be homologous with the target sequence.

[0417] In some embodiments, each residue of the sense strand and antisense strand is independently modified with LNA, glycol nucleic acid (GNA), hexitol nucleic acid (HNA), 2′-methoxyethyl, 2′-O-methyl, 2′-O-allyl, 2′-C-allyl, 2′-deoxy, or 2′-fluoro. The strands can contain more than one modification. In some embodiments, each residue of the sense strand and antisense strand is independently modified with 2′-O-methyl or 2′-fluoro. It is to be understood that these modifications are in addition to the at least one thermally destabilizing modification of the duplex present in the antisense strand.

[0418] At least two different modifications are typically present on the sense strand and antisense strand. Those two modifications may be the 2′-deoxy, 2′-O-methyl or 2′-fluoro modifications, acyclic nucleotides or others. In some embodiments, the sense strand and antisense strand each comprises two differently modified nucleotides selected from 2′-O-methyl or 2′-deoxy. In some embodiments, each residue of the sense strand and antisense strand is independently modified with 2′-O-methyl nucleotide, 2′-deoxy nucleotide, 2′-deoxy-2′-fluoro nucleotide, 2′-O-N-methylacetamido (2′-O-NMA, 2′O-CH2C(O)N(Me)H) nucleotide, a 2′-O-dimethylaminoethoxyethyl (2′-O-DMAEOE) nucleotide, 2′-O-aminopropyl (2′-O-AP) nucleotide, or 2′-ara-F nucleotide. Again, it is to be understood that these modifications are in addition to the at least one thermally destabilizing modification of the duplex present in the antisense strand.

[0419] In some embodiments, the dsRNA molecule of the disclosure comprises modifications of an alternating pattern. The term “alternating motif” or “alternative pattern” as used herein refers to a motif having one or more modifications, each modification occurring on alternating nucleotides of one strand. The alternating nucleotide may refer to one per every other nucleotide or one per every three nucleotides, or a similar pattern. For example, if A, B and C each represent one type of modification to the nucleotide, the alternating motif can be “ABABABABABAB . . . ,” “AABBAABBAABB . . . ,” “AABAABAABAAB . . . ,” “AAABAAABAAAB . . . ,” “AAABBBAAABBB . . . ,” or “ABCABCABCABC . . . ,” etc.

[0420] The type of modifications contained in the alternating motif may be the same or different. For example, if A, B, C, D each represent one type of modification on the nucleotide, the alternating pattern, i.e., modifications on every other nucleotide, may be the same, but each of the sense strand or antisense strand can be selected from several possibilities of modifications within the alternating motif such as “ABABAB . . . ”, “ACACAC . . . ” “BDBDBD . . . ” or “CDCDCD . . . ,” etc.

[0421] In some embodiments, the dsRNA molecule of the disclosure comprises the modification pattern for the alternating motif on the sense strand relative to the modification pattern for the alternating motif on the antisense strand is shifted. The shift may be such that the modified group of nucleotides of the sense strand corresponds to a differently modified group of nucleotides of the antisense strand and vice versa. For example, the sense strand when paired with the antisense strand in the dsRNA duplex, the alternating motif in the sense strand may start with “ABABAB” from 5′-3′ of the strand and the alternating motif in the antisense strand may start with “BABABA” from 3′-5′ of the strand within the duplex region. As another example, the alternating motif in the sense strand may start with “AABBAABB” from 5′-3′ of the strand and the alternating motif in the antisense strand may start with “BBAABBAA” from 3′-5′ of the strand within the duplex region, so that there is a complete or partial shift of the modification patterns between the sense strand and the antisense strand.

[0422] The dsRNA molecule of the disclosure may further comprise at least one phosphorothioate or methylphosphonate internucleotide linkage. The phosphorothioate or methylphosphonate internucleotide linkage modification may occur on any nucleotide of the sense strand or antisense strand or both in any position of the strand. For instance, the internucleotide linkage modification may occur on every nucleotide on the sense strand or antisense strand; each internucleotide linkage modification may occur in an alternating pattern on the sense strand or antisense strand; or the sense strand or antisense strand comprises both internucleotide linkage modifications in an alternating pattern. The alternating pattern of the internucleotide linkage modification on the sense strand may be the same or different from the antisense strand, and the alternating pattern of the internucleotide linkage modification on the sense strand may have a shift relative to the alternating pattern of the internucleotide linkage modification on the antisense strand.

[0423] In some embodiments, the dsRNA molecule comprises the phosphorothioate or methylphosphonate internucleotide linkage modification in the overhang region. For example, the overhang region comprises two nucleotides having a phosphorothioate or methylphosphonate internucleotide linkage between the two nucleotides. Internucleotide linkage modifications also may be made to link the overhang nucleotides with the terminal paired nucleotides within duplex region. For example, at least 2, 3, 4, or all the overhang nucleotides may be linked through phosphorothioate or methylphosphonate internucleotide linkage, and optionally, there may be additional phosphorothioate or methylphosphonate internucleotide linkages linking the overhang nucleotide with a paired nucleotide that is next to the overhang nucleotide. For instance, there may be at least two phosphorothioate internucleotide linkages between the terminal three nucleotides, in which two of the three nucleotides are overhang nucleotides, and the third is a paired nucleotide next to the overhang nucleotide. In one embodiment, these terminal three nucleotides may be at the 3′-end of the antisense strand.

[0424] In some embodiments, the sense strand of the dsRNA molecule comprises 1-10 blocks of two to ten phosphorothioate or methylphosphonate internucleotide linkages separated by 1, 2, 3, 4, 5, 6, 7, 8, 9, 10, 11, 12, 13, 14, 15, or 16 phosphate internucleotide linkages, wherein one of the phosphorothioate or methylphosphonate internucleotide linkages is placed at any position in the oligonucleotide sequence and the said sense strand is paired with an antisense strand comprising any combination of phosphorothioate, methylphosphonate and phosphate internucleotide linkages or an antisense strand comprising either phosphorothioate or methylphosphonate or phosphate linkage.

[0425] In some embodiments, the antisense strand of the dsRNA molecule comprises two blocks of two phosphorothioate or methylphosphonate internucleotide linkages separated by 1, 2, 3, 4, 5, 6, 7, 8, 9, 10, 11, 12, 13, 14, 15, 16, 17, or 18 phosphate internucleotide linkages, wherein one of the phosphorothioate or methylphosphonate internucleotide linkages is placed at any position in the oligonucleotide sequence and the said antisense strand is paired with a sense strand comprising any combination of phosphorothioate, methylphosphonate and phosphate internucleotide linkages or an antisense strand comprising either phosphorothioate or methylphosphonate or phosphate linkage.

[0426] In some embodiments, the antisense strand of the dsRNA molecule comprises two blocks of three phosphorothioate or methylphosphonate internucleotide linkages separated by 1, 2, 3, 4, 5, 6, 7, 8, 9, 10, 11, 12, 13, 14, 15, or 16 phosphate internucleotide linkages, wherein one of the phosphorothioate or methylphosphonate internucleotide linkages is placed at any position in the oligonucleotide sequence and the said antisense strand is paired with a sense strand comprising any combination of phosphorothioate, methylphosphonate and phosphate internucleotide linkages or an antisense strand comprising either phosphorothioate or methylphosphonate or phosphate linkage.

[0427] In some embodiments, the antisense strand of the dsRNA molecule comprises two blocks of four phosphorothioate or methylphosphonate internucleotide linkages separated by 1, 2, 3, 4, 5, 6, 7, 8, 9, 10, 11, 12, 13, or 14 phosphate internucleotide linkages, wherein one of the phosphorothioate or methylphosphonate internucleotide linkages is placed at any position in the oligonucleotide sequence and the said antisense strand is paired with a sense strand comprising any combination of phosphorothioate, methylphosphonate and phosphate internucleotide linkages or an antisense strand comprising either phosphorothioate or methylphosphonate or phosphate linkage.

[0428] In some embodiments, the antisense strand of the dsRNA molecule comprises two blocks of five phosphorothioate or methylphosphonate internucleotide linkages separated by 1, 2, 3, 4, 5, 6, 7, 8, 9, 10, 11, or 12 phosphate internucleotide linkages, wherein one of the phosphorothioate or methylphosphonate internucleotide linkages is placed at any position in the oligonucleotide sequence and the said antisense strand is paired with a sense strand comprising any combination of phosphorothioate, methylphosphonate and phosphate internucleotide linkages or an antisense strand comprising either phosphorothioate or methylphosphonate or phosphate linkage.

[0429] In some embodiments, the antisense strand of the dsRNA molecule comprises two blocks of six phosphorothioate or methylphosphonate internucleotide linkages separated by 1, 2, 3, 4, 5, 6, 7, 8, 9, or 10 phosphate internucleotide linkages, wherein one of the phosphorothioate or methylphosphonate internucleotide linkages is placed at any position in the oligonucleotide sequence and the said antisense strand is paired with a sense strand comprising any combination of phosphorothioate, methylphosphonate and phosphate internucleotide linkages or an antisense strand comprising either phosphorothioate or methylphosphonate or phosphate linkage.

[0430] In some embodiments, the antisense strand of the dsRNA molecule comprises two blocks of seven phosphorothioate or methylphosphonate internucleotide linkages separated by 1, 2, 3, 4, 5, 6, 7, or 8 phosphate internucleotide linkages, wherein one of the phosphorothioate or methylphosphonate internucleotide linkages is placed at any position in the oligonucleotide sequence and the said antisense strand is paired with a sense strand comprising any combination of phosphorothioate, methylphosphonate and phosphate internucleotide linkages or an antisense strand comprising either phosphorothioate or methylphosphonate or phosphate linkage.

[0431] In some embodiments, the antisense strand of the dsRNA molecule comprises two blocks of eight phosphorothioate or methylphosphonate internucleotide linkages separated by 1, 2, 3, 4, 5, or 6 phosphate internucleotide linkages, wherein one of the phosphorothioate or methylphosphonate internucleotide linkages is placed at any position in the oligonucleotide sequence and the said antisense strand is paired with a sense strand comprising any combination of phosphorothioate, methylphosphonate and phosphate internucleotide linkages or an antisense strand comprising either phosphorothioate or methylphosphonate or phosphate linkage.

[0432] In some embodiments, the antisense strand of the dsRNA molecule comprises two blocks of nine phosphorothioate or methylphosphonate internucleotide linkages separated by 1, 2, 3, or 4 phosphate internucleotide linkages, wherein one of the phosphorothioate or methylphosphonate internucleotide linkages is placed at any position in the oligonucleotide sequence and the said antisense strand is paired with a sense strand comprising any combination of phosphorothioate, methylphosphonate and phosphate internucleotide linkages or an antisense strand comprising either phosphorothioate or methylphosphonate or phosphate linkage.

[0433] In some embodiments, the dsRNA molecule of the disclosure further comprises one or more phosphorothioate or methylphosphonate internucleotide linkage modification within 1-10 nucleotides of the termini position(s) of the sense or antisense strand. For example, at least 2, 3, 4, 5, 6, 7, 8, 9, or 10 nucleotides may be linked through phosphorothioate or methylphosphonate internucleotide linkage at one end or both ends of the sense or antisense strand.

[0434] In some embodiments, the dsRNA molecule of the disclosure further comprises one or more phosphorothioate or methylphosphonate internucleotide linkage modification within 1-10 nucleotides of the internal region of the duplex of each of the sense or antisense strand. For example, at least 2, 3, 4, 5, 6, 7, 8, 9, or 10 nucleotides may be linked through phosphorothioate or methylphosphonate internucleotide linkage at position 8-16 of the duplex region counting from the 5′-end of the sense strand; the dsRNA molecule can optionally further comprise one or more phosphorothioate or methylphosphonate internucleotide linkage modification within 1-10 of the termini position(s).

[0435] In some embodiments, the dsRNA molecule of the disclosure further comprises one to five phosphorothioate or methylphosphonate internucleotide linkage modification(s) within position 1-5 and one to five phosphorothioate or methylphosphonate internucleotide linkage modification(s) within position 18-23 of the sense strand (counting from the 5′-end), and one to two phosphorothioate or methylphosphonate internucleotide linkage modification at positions 1 and 2 and one to five within positions 18-23 of the antisense strand (counting from the 5′-end).

[0436] In some embodiments, the dsRNA molecule of the disclosure further comprises one phosphorothioate internucleotide linkage modification within position 1-5 and one phosphorothioate or methylphosphonate internucleotide linkage modification within position 18-23 of the sense strand (counting from the 5′-end), and one phosphorothioate internucleotide linkage modification at positions 1 or 2 and two phosphorothioate or methylphosphonate internucleotide linkage modifications within positions 18-23 of the antisense strand (counting from the 5′-end).

[0437] In some embodiments, the dsRNA molecule of the disclosure further comprises two phosphorothioate internucleotide linkage modifications within position 1-5 and one phosphorothioate internucleotide linkage modification within position 18-23 of the sense strand (counting from the 5′-end), and one phosphorothioate internucleotide linkage modification at positions 1 and 2 and two phosphorothioate internucleotide linkage modifications within positions 18-23 of the antisense strand (counting from the 5′-end).

[0438] In some embodiments, the dsRNA molecule of the disclosure further comprises two phosphorothioate internucleotide linkage modifications within position 1-5 and two phosphorothioate internucleotide linkage modifications within position 18-23 of the sense strand (counting from the 5′-end), and one phosphorothioate internucleotide linkage modification at positions 1 and 2 and two phosphorothioate internucleotide linkage modifications within positions 18-23 of the antisense strand (counting from the 5′-end).

[0439] In some embodiments, the dsRNA molecule of the disclosure further comprises two phosphorothioate internucleotide linkage modifications within position 1-5 and two phosphorothioate internucleotide linkage modifications within position 18-23 of the sense strand (counting from the 5′-end), and one phosphorothioate internucleotide linkage modification at positions 1 and 2 and one phosphorothioate internucleotide linkage modification within positions 18-23 of the antisense strand (counting from the 5′-end).

[0440] In some embodiments, the dsRNA molecule of the disclosure further comprises one phosphorothioate internucleotide linkage modification within position 1-5 and one phosphorothioate internucleotide linkage modification within position 18-23 of the sense strand (counting from the 5′-end), and two phosphorothioate internucleotide linkage modifications at positions 1 and 2 and two phosphorothioate internucleotide linkage modifications within positions 18-23 of the antisense strand (counting from the 5′-end).

[0441] In some embodiments, the dsRNA molecule of the disclosure further comprises one phosphorothioate internucleotide linkage modification within position 1-5 and one within position 18-23 of the sense strand (counting from the 5′-end), and two phosphorothioate internucleotide linkage modification at positions 1 and 2 and one phosphorothioate internucleotide linkage modification within positions 18-23 of the antisense strand (counting from the 5′-end).

[0442] In some embodiments, the dsRNA molecule of the disclosure further comprises one phosphorothioate internucleotide linkage modification within position 1-5 (counting from the 5′-end) of the sense strand, and two phosphorothioate internucleotide linkage modifications at positions 1 and 2 and one phosphorothioate internucleotide linkage modification within positions 18-23 of the antisense strand (counting from the 5′-end).

[0443] In some embodiments, the dsRNA molecule of the disclosure further comprises two phosphorothioate internucleotide linkage modifications within position 1-5 (counting from the 5′-end) of the sense strand, and one phosphorothioate internucleotide linkage modification at positions 1 and 2 and two phosphorothioate internucleotide linkage modifications within positions 18-23 of the antisense strand (counting from the 5′-end).

[0444] In some embodiments, the dsRNA molecule of the disclosure further comprises two phosphorothioate internucleotide linkage modifications within position 1-5 and one within position 18-23 of the sense strand (counting from the 5′-end), and two phosphorothioate internucleotide linkage modifications at positions 1 and 2 and one phosphorothioate internucleotide linkage modification within positions 18-23 of the antisense strand (counting from the 5′-end).

[0445] In some embodiments, the dsRNA molecule of the disclosure further comprises two phosphorothioate internucleotide linkage modifications within position 1-5 and one phosphorothioate internucleotide linkage modification within position 18-23 of the sense strand (counting from the 5′-end), and two phosphorothioate internucleotide linkage modifications at positions 1 and 2 and two phosphorothioate internucleotide linkage modifications within positions 18-23 of the antisense strand (counting from the 5′-end).

[0446] In some embodiments, the dsRNA molecule of the disclosure further comprises two phosphorothioate internucleotide linkage modifications within position 1-5 and one phosphorothioate internucleotide linkage modification within position 18-23 of the sense strand (counting from the 5′-end), and one phosphorothioate internucleotide linkage modification at positions 1 and 2 and two phosphorothioate internucleotide linkage modifications within positions 18-23 of the antisense strand (counting from the 5′-end).

[0447] In some embodiments, the dsRNA molecule of the disclosure further comprises two phosphorothioate internucleotide linkage modifications at position 1 and 2, and two phosphorothioate internucleotide linkage modifications at position 20 and 21 of the sense strand (counting from the 5′-end), and one phosphorothioate internucleotide linkage modification at positions 1 and one at position 21 of the antisense strand (counting from the 5′-end).

[0448] In some embodiments, the dsRNA molecule of the disclosure further comprises one phosphorothioate internucleotide linkage modification at position 1, and one phosphorothioate internucleotide linkage modification at position 21 of the sense strand (counting from the 5′-end), and two phosphorothioate internucleotide linkage modifications at positions 1 and 2 and two phosphorothioate internucleotide linkage modifications at positions 20 and 21 the antisense strand (counting from the 5′-end).

[0449] In some embodiments, the dsRNA molecule of the disclosure further comprises two phosphorothioate internucleotide linkage modifications at position 1 and 2, and two phosphorothioate internucleotide linkage modifications at position 21 and 22 of the sense strand (counting from the 5′-end), and one phosphorothioate internucleotide linkage modification at positions 1 and one phosphorothioate internucleotide linkage modification at position 21 of the antisense strand (counting from the 5′-end).

[0450] In some embodiments, the dsRNA molecule of the disclosure further comprises one phosphorothioate internucleotide linkage modification at position 1, and one phosphorothioate internucleotide linkage modification at position 21 of the sense strand (counting from the 5′-end), and two phosphorothioate internucleotide linkage modifications at positions 1 and 2 and two phosphorothioate internucleotide linkage modifications at positions 21 and 22 the antisense strand (counting from the 5′-end).

[0451] In some embodiments, the dsRNA molecule of the disclosure further comprises two phosphorothioate internucleotide linkage modifications at position 1 and 2, and two phosphorothioate internucleotide linkage modifications at position 22 and 23 of the sense strand (counting from the 5′-end), and one phosphorothioate internucleotide linkage modification at positions 1 and one phosphorothioate internucleotide linkage modification at position 21 of the antisense strand (counting from the 5′-end).

[0452] In some embodiments, the dsRNA molecule of the disclosure further comprises one phosphorothioate internucleotide linkage modification at position 1, and one phosphorothioate internucleotide linkage modification at position 21 of the sense strand (counting from the 5′-end), and two phosphorothioate internucleotide linkage modifications at positions 1 and 2 and two phosphorothioate internucleotide linkage modifications at positions 23 and 23 the antisense strand (counting from the 5′-end).

[0453] In some embodiments, compound of the disclosure comprises a pattern of backbone chiral centers. In some embodiments, a common pattern of backbone chiral centers comprises at least 5 internucleotidic linkages in the Sp configuration. In some embodiments, a common pattern of backbone chiral centers comprises at least 6 internucleotidic linkages in the Sp configuration. In some embodiments, a common pattern of backbone chiral centers comprises at least 7 internucleotidic linkages in the Sp configuration. In some embodiments, a common pattern of backbone chiral centers comprises at least 8 internucleotidic linkages in the Sp configuration. In some embodiments, a common pattern of backbone chiral centers comprises at least 9 internucleotidic linkages in the Sp configuration. In some embodiments, a common pattern of backbone chiral centers comprises at least 10 internucleotidic linkages in the Sp configuration. In some embodiments, a common pattern of backbone chiral centers comprises at least 11 internucleotidic linkages in the Sp configuration. In some embodiments, a common pattern of backbone chiral centers comprises at least 12 internucleotidic linkages in the Sp configuration. In some embodiments, a common pattern of backbone chiral centers comprises at least 13 internucleotidic linkages in the Sp configuration. In some embodiments, a common pattern of backbone chiral centers comprises at least 14 internucleotidic linkages in the Sp configuration. In some embodiments, a common pattern of backbone chiral centers comprises at least 15 internucleotidic linkages in the Sp configuration. In some embodiments, a common pattern of backbone chiral centers comprises at least 16 internucleotidic linkages in the Sp configuration. In some embodiments, a common pattern of backbone chiral centers comprises at least 17 internucleotidic linkages in the Sp configuration. In some embodiments, a common pattern of backbone chiral centers comprises at least 18 internucleotidic linkages in the Sp configuration. In some embodiments, a common pattern of backbone chiral centers comprises at least 19 internucleotidic linkages in the Sp configuration. In some embodiments, a common pattern of backbone chiral centers comprises no more than 8 internucleotidic linkages in the Rp configuration. In some embodiments, a common pattern of backbone chiral centers comprises no more than 7 internucleotidic linkages in the Rp configuration. In some embodiments, a common pattern of backbone chiral centers comprises no more than 6 internucleotidic linkages in the Rp configuration. In some embodiments, a common pattern of backbone chiral centers comprises no more than 5 internucleotidic linkages in the Rp configuration. In some embodiments, a common pattern of backbone chiral centers comprises no more than 4 internucleotidic linkages in the Rp configuration. In some embodiments, a common pattern of backbone chiral centers comprises no more than 3 internucleotidic linkages in the Rp configuration. In some embodiments, a common pattern of backbone chiral centers comprises no more than 2 internucleotidic linkages in the Rp configuration. In some embodiments, a common pattern of backbone chiral centers comprises no more than 1 internucleotidic linkages in the Rp configuration. In some embodiments, a common pattern of backbone chiral centers comprises no more than 8 internucleotidic linkages which are not chiral (as a non-limiting example, a phosphodiester). In some embodiments, a common pattern of backbone chiral centers comprises no more than 7 internucleotidic linkages which are not chiral. In some embodiments, a common pattern of backbone chiral centers comprises no more than 6 internucleotidic linkages which are not chiral. In some embodiments, a common pattern of backbone chiral centers comprises no more than 5 internucleotidic linkages which are not chiral. In some embodiments, a common pattern of backbone chiral centers comprises no more than 4 internucleotidic linkages which are not chiral. In some embodiments, a common pattern of backbone chiral centers comprises no more than 3 internucleotidic linkages which are not chiral. In some embodiments, a common pattern of backbone chiral centers comprises no more than 2 internucleotidic linkages which are not chiral. In some embodiments, a common pattern of backbone chiral centers comprises no more than 1 internucleotidic linkages which are not chiral. In some embodiments, a common pattern of backbone chiral centers comprises at least 10 internucleotidic linkages in the Sp configuration, and no more than 8 internucleotidic linkages which are not chiral. In some embodiments, a common pattern of backbone chiral centers comprises at least 11 internucleotidic linkages in the Sp configuration, and no more than 7 internucleotidic linkages which are not chiral. In some embodiments, a common pattern of backbone chiral centers comprises at least 12 internucleotidic linkages in the Sp configuration, and no more than 6 internucleotidic linkages which are not chiral. In some embodiments, a common pattern of backbone chiral centers comprises at least 13 internucleotidic linkages in the Sp configuration, and no more than 6 internucleotidic linkages which are not chiral. In some embodiments, a common pattern of backbone chiral centers comprises at least 14 internucleotidic linkages in the Sp configuration, and no more than 5 internucleotidic linkages which are not chiral. In some embodiments, a common pattern of backbone chiral centers comprises at least 15 internucleotidic linkages in the Sp configuration, and no more than 4 internucleotidic linkages which are not chiral. In some embodiments, the internucleotidic linkages in the Sp configuration are optionally contiguous or not contiguous. In some embodiments, the internucleotidic linkages in the Rp configuration are optionally contiguous or not contiguous. In some embodiments, the internucleotidic linkages which are not chiral are optionally contiguous or not contiguous.

[0454] In some embodiments, compound of the disclosure comprises a block is a stereochemistry block. In some embodiments, a block is an Rp block in that each internucleotidic linkage of the block is Rp. In some embodiments, a 5′-block is an Rp block. In some embodiments, a 3′-block is an Rp block. In some embodiments, a block is an Sp block in that each internucleotidic linkage of the block is Sp. In some embodiments, a 5′-block is an Sp block. In some embodiments, a 3′-block is an Sp block. In some embodiments, provided oligonucleotides comprise both Rp and Sp blocks. In some embodiments, provided oligonucleotides comprise one or more Rp but no Sp blocks. In some embodiments, provided oligonucleotides comprise one or more Sp but no Rp blocks. In some embodiments, provided oligonucleotides comprise one or more PO blocks wherein each internucleotidic linkage in a natural phosphate linkage.

[0455] In some embodiments, compound of the disclosure comprises a 5′-block is an Sp block wherein each sugar moiety comprises a 2′-F modification. In some embodiments, a 5′-block is an Sp block wherein each of internucleotidic linkage is a modified internucleotidic linkage and each sugar moiety comprises a 2′-F modification. In some embodiments, a 5′-block is an Sp block wherein each of internucleotidic linkage is a phosphorothioate linkage and each sugar moiety comprises a 2′-F modification. In some embodiments, a 5′-block comprises 4 or more nucleoside units. In some embodiments, a 5′-block comprises 5 or more nucleoside units. In some embodiments, a 5′-block comprises 6 or more nucleoside units. In some embodiments, a 5′-block comprises 7 or more nucleoside units. In some embodiments, a 3′-block is an Sp block wherein each sugar moiety comprises a 2′-F modification. In some embodiments, a 3′-block is an Sp block wherein each of internucleotidic linkage is a modified internucleotidic linkage and each sugar moiety comprises a 2′-F modification. In some embodiments, a 3′-block is an Sp block wherein each of internucleotidic linkage is a phosphorothioate linkage and each sugar moiety comprises a 2′-F modification. In some embodiments, a 3′-block comprises 4 or more nucleoside units. In some embodiments, a 3′-block comprises 5 or more nucleoside units. In some embodiments, a 3′-block comprises 6 or more nucleoside units. In some embodiments, a 3′-block comprises 7 or more nucleoside units.

[0456] In some embodiments, compound of the disclosure comprises a type of nucleoside in a region or an oligonucleotide is followed by a specific type of internucleotidic linkage, e.g., natural phosphate linkage, modified internucleotidic linkage, Rp chiral internucleotidic linkage, Sp chiral internucleotidic linkage, etc. In some embodiments, A is followed by Sp. In some embodiments, A is followed by Rp. In some embodiments, A is followed by natural phosphate linkage (PO). In some embodiments, U is followed by Sp. In some embodiments, U is followed by Rp. In some embodiments, U is followed by natural phosphate linkage (PO). In some embodiments, C is followed by Sp. In some embodiments, C is followed by Rp. In some embodiments, C is followed by natural phosphate linkage (PO). In some embodiments, G is followed by Sp. In some embodiments, G is followed by Rp. In some embodiments, G is followed by natural phosphate linkage (PO). In some embodiments, C and U are followed by Sp. In some embodiments, C and U are followed by Rp. In some embodiments, C and U are followed by natural phosphate linkage (PO). In some embodiments, A and G are followed by Sp. In some embodiments, A and G are followed by Rp.

[0457] In some embodiments, the antisense strand comprises phosphorothioate internucleotide linkages between nucleotide positions 21 and 22, and between nucleotide positions 22 and 23, wherein the antisense strand contains at least one thermally destabilizing modification of the duplex located in the seed region of the antisense strand (i.e., at position 2-8 of the 5′-end of the antisense strand or at position 2-9 of the 5′-end of the antisense strand), and wherein the dsRNA optionally further has at least one (e.g., one, two, three, four, five, six, seven or all eight) of the following characteristics: (i) the antisense comprises 2, 3, 4, 5, or 6 2′-fluoro modifications; (ii) the antisense comprises 3, 4, or 5 phosphorothioate internucleotide linkages; (iii) the sense strand is conjugated with a ligand; (iv) the sense strand comprises 2, 3, 4 or 5 2′-fluoro modifications; (v) the sense strand comprises 1, 2, 3, 4, or 5 phosphorothioate internucleotide linkages; (vi) the dsRNA comprises at least four 2′-fluoro modifications; (vii) the dsRNA comprises a duplex region of 12-40 nucleotide pairs in length; and (viii) the dsRNA has a blunt end at 5′-end of the antisense strand.

[0458] In some embodiments, the antisense strand comprises phosphorothioate internucleotide linkages between nucleotide positions 1 and 2, between nucleotide positions 2 and 3, between nucleotide positions 21 and 22, and between nucleotide positions 22 and 23, wherein the antisense strand contains at least one thermally destabilizing modification of the duplex located in the seed region of the antisense strand (i.e., at position 2-8 of the 5′-end of the antisense strand or at position 2-9 of the 5′-end of the antisense strand), and wherein the dsRNA optionally further has at least one (e.g., one, two, three, four, five, six, seven or all eight) of the following characteristics: (i) the antisense comprises 2, 3, 4, 5, or 6 2′-fluoro modifications; (ii) the sense strand is conjugated with a ligand; (iii) the sense strand comprises 2, 3, 4 or 5 2′-fluoro modifications; (iv) the sense strand comprises 1, 2, 3, 4, or 5 phosphorothioate internucleotide linkages; (v) the dsRNA comprises at least four 2′-fluoro modifications; (vi) the dsRNA comprises a duplex region of 12-40 nucleotide pairs in length; (vii) the dsRNA comprises a duplex region of 12-40 nucleotide pairs in length; and (viii) the dsRNA has a blunt end at 5′-end of the antisense strand.

[0459] In some embodiments, the sense strand comprises phosphorothioate internucleotide linkages between nucleotide positions 1 and 2, and between nucleotide positions 2 and 3, wherein the antisense strand contains at least one thermally destabilizing modification of the duplex located in the seed region of the antisense strand (i.e., at position 2-8 of the 5′-end of the antisense strand or at position 2-9 of the 5′-end of the antisense strand), and wherein the dsRNA optionally further has at least one (e.g., one, two, three, four, five, six, seven or all eight) of the following characteristics: (i) the antisense comprises 2, 3, 4, 5, or 6 2′-fluoro modifications; (ii) the antisense comprises 1, 2, 3, 4, or 5 phosphorothioate internucleotide linkages; (iii) the sense strand is conjugated with a ligand; (iv) the sense strand comprises 2, 3, 4 or 5 2′-fluoro modifications; (v) the sense strand comprises 3, 4 or 5 phosphorothioate internucleotide linkages; (vi) the dsRNA comprises at least four 2′-fluoro modifications; (vii) the dsRNA comprises a duplex region of 12-40 nucleotide pairs in length; and (viii) the dsRNA has a blunt end at 5′-end of the antisense strand.

[0460] In some embodiments, the sense strand comprises phosphorothioate internucleotide linkages between nucleotide positions 1 and 2, and between nucleotide positions 2 and 3, the antisense strand comprises phosphorothioate internucleotide linkages between nucleotide positions 1 and 2, between nucleotide positions 2 and 3, between nucleotide positions 21 and 22, and between nucleotide positions 22 and 23, wherein the antisense strand contains at least one thermally destabilizing modification of the duplex located in the seed region of the antisense strand (i.e., at position 2-8 of the 5′-end of the antisense strand or at position 2-9 of the 5′-end of the antisense strand), and wherein the dsRNA optionally further has at least one (e.g., one, two, three, four, five, six or all seven) of the following characteristics: (i) the antisense comprises 2, 3, 4, 5 or 6 2′-fluoro modifications; (ii) the sense strand is conjugated with a ligand; (iii) the sense strand comprises 2, 3, 4 or 5 2′-fluoro modifications; (iv) the sense strand comprises 3, 4 or 5 phosphorothioate internucleotide linkages; (v) the dsRNA comprises at least four 2′-fluoro modifications; (vi) the dsRNA comprises a duplex region of 12-40 nucleotide pairs in length; and (vii) the dsRNA has a blunt end at 5′-end of the antisense strand.

[0461] In some embodiments, the dsRNA molecule of the disclosure comprises mismatch(es) with the target, within the duplex, or combinations thereof. The mismatch can occur in the overhang region or the duplex region. The base pair can be ranked on the basis of their propensity to promote dissociation or melting (e.g., on the free energy of association or dissociation of a particular pairing, the simplest approach is to examine the pairs on an individual pair basis, though next neighbor or similar analysis can also be used). In terms of promoting dissociation: A:U is preferred over G:C; G:U is preferred over G:C; and I:C is preferred over G:C (I=inosine). Mismatches, e.g., non-canonical or other than canonical pairings (as described elsewhere herein) are preferred over canonical (A:T, A:U, G:C) pairings; and pairings which include a universal base are preferred over canonical pairings.

[0462] In some embodiments, the dsRNA molecule of the disclosure comprises at least one of the first 1, 2, 3, 4, or 5 base pairs within the duplex regions from the 5′-end of the antisense strand can be chosen independently from the group of: A:U, G:U, I:C, and mismatched pairs, e.g., non-canonical or other than canonical pairings or pairings which include a universal base, to promote the dissociation of the antisense strand at the 5′-end of the duplex.

[0463] In some embodiments, the nucleotide at the 1 position within the duplex region from the 5′-end in the antisense strand is selected from the group consisting of A, dA, dU, U, and dT. Alternatively, at least one of the first 1, 2 or 3 base pair within the duplex region from the 5′-end of the antisense strand is an AU base pair. For example, the first base pair within the duplex region from the 5′-end of the antisense strand is an AU base pair.

[0464] It was found that introducing 4′-modified or 5′-modified nucleotide to the 3′-end of a phosphodiester (PO), phosphorothioate (PS), or phosphorodithioate (PS2) linkage of a dinucleotide at any position of single stranded or double stranded oligonucleotide can exert steric effect to the internucleotide linkage and, hence, protecting or stabilizing it against nucleases.

[0465] In some embodiments, 5′-modified nucleotide is introduced at the 3′-end of a dinucleotide at any position of single stranded or double stranded siRNA. For instance, a 5′-alkylated nucleotide may be introduced at the 3′-end of a dinucleotide at any position of single stranded or double stranded siRNA. The alkyl group at the 5′ position of the ribose sugar can be racemic or chirally pure R or S isomer. An exemplary 5′-alkylated nucleotide is 5′-methyl nucleoside. The 5′-methyl can be either racemic or chirally pure R or S isomer.

[0466] In some embodiments, 4′-modified nucleotide is introduced at the 3′-end of a dinucleotide at any position of single stranded or double stranded siRNA. For instance, a 4′-alkylated nucleotide may be introduced at the 3′-end of a dinucleotide at any position of single stranded or double stranded siRNA. The alkyl group at the 4′ position of the ribose sugar can be racemic or chirally pure R or S isomer. An exemplary 4′-alkylated nucleotide is 4′-methyl nucleotide. The 4′-methyl can be either racemic or chirally pure R or S isomer. Alternatively, a 4′-O-alkylated nucleotide may be introduced at the 3′-end of a dinucleotide at any position of single stranded or double stranded siRNA. The 4′-O-alkyl of the ribose sugar can be racemic or chirally pure R or S isomer. An exemplary 4′-O-alkylated nucleotide is 4′-O-methyl nucleotide. The 4′-O-methyl can be either racemic or chirally pure R or S isomer.

[0467] In some embodiments, 5′-alkylated nucleotide is introduced at any position on the sense strand or antisense strand of a dsRNA, and such modification maintains or improves potency of the dsRNA. The 5′-alkyl can be either racemic or chirally pure R or S isomer. An exemplary 5′-alkylated nucleotide is 5′-methyl nucleotide. The 5′-methyl can be either racemic or chirally pure R or S isomer.

[0468] In some embodiments, 4′-alkylated nucleotide is introduced at any position on the sense strand or antisense strand of a dsRNA, and such modification maintains or improves potency of the dsRNA. The 4′-alkyl can be either racemic or chirally pure R or S isomer. An exemplary 4′-alkylated nucleotide is 4′-methyl nucleotide. The 4′-methyl can be either racemic or chirally pure R or S isomer.

[0469] In some embodiments, 4′-O-alkylated nucleotide is introduced at any position on the sense strand or antisense strand of a dsRNA, and such modification maintains or improves potency of the dsRNA. The 5′-alkyl can be either racemic or chirally pure R or S isomer. An exemplary 4′-O-alkylated nucleotide is 4′-O-methyl nucleotide. The 4′-O-methyl can be either racemic or chirally pure R or S isomer.

[0470] In some embodiments, the dsRNA molecule of the disclosure can comprise 2′-5′ linkages (with 2′-H, 2′-OH and 2′-OMe and with P═O or P═S). For example, the 2′-5′ linkages modifications can be used to promote nuclease resistance or to inhibit binding of the sense to the antisense strand, or can be used at the 5′ end of the sense strand to avoid sense strand activation by RISC.

[0471] In another embodiment, the dsRNA molecule of the disclosure can comprise L sugars (e.g., L ribose, L-arabinose with 2′-H, 2′-OH and 2′-OMe). For example, these L sugars modifications can be used to promote nuclease resistance or to inhibit binding of the sense to the antisense strand, or can be used at the 5′ end of the sense strand to avoid sense strand activation by RISC.

[0472] Various publications describe multimeric siRNA which can all be used with the dsRNA of the disclosure. Such publications include WO2007/091269, U.S. Pat. No. 7,858,769, WO2010/141511, WO2007/117686, WO2009/014887, and WO2011/031520 which are hereby incorporated by their entirely.

[0473] As described in more detail below, the RNAi agent that contains conjugations of one or more carbohydrate moieties to an RNAi agent can optimize one or more properties of the RNAi agent. In many cases, the carbohydrate moiety will be attached to a modified subunit of the RNAi agent. For example, the ribose sugar of one or more ribonucleotide subunits of a dsRNA agent can be replaced with another moiety, e.g., a non-carbohydrate (such as, cyclic) carrier to which is attached a carbohydrate ligand. A ribonucleotide subunit in which the ribose sugar of the subunit has been so replaced is referred to herein as a ribose replacement modification subunit (RRMS). A cyclic carrier may be a carbocyclic ring system, i.e., all ring atoms are carbon atoms, or a heterocyclic ring system, i.e., one or more ring atoms may be a heteroatom, e.g., nitrogen, oxygen, sulfur. The cyclic carrier may be a monocyclic ring system, or may contain two or more rings, e.g. fused rings. The cyclic carrier may be a fully saturated ring system, or it may contain one or more double bonds.

[0474] The ligand may be attached to the polynucleotide via a carrier. The carriers include (i) at least one “backbone attachment point,” such as two “backbone attachment points” and (ii) at least one “tethering attachment point.” A “backbone attachment point” as used herein refers to a functional group, e.g. a hydroxyl group, or generally, a bond available for, and that is suitable for incorporation of the carrier into the backbone, e.g., the phosphate, or modified phosphate, e.g., sulfur containing, backbone, of a ribonucleic acid. A “tethering attachment point” (TAP) in some embodiments refers to a constituent ring atom of the cyclic carrier, e.g., a carbon atom or a heteroatom (distinct from an atom which provides a backbone attachment point), that connects a selected moiety. The moiety can be, e.g., a carbohydrate, e.g. monosaccharide, disaccharide, trisaccharide, tetrasaccharide, oligosaccharide and polysaccharide. Optionally, the selected moiety is connected by an intervening tether to the cyclic carrier. Thus, the cyclic carrier will often include a functional group, e.g., an amino group, or generally, provide a bond, that is suitable for incorporation or tethering of another chemical entity, e.g., a ligand to the constituent ring.

[0475] The RNAi agents may be conjugated to a ligand via a carrier, wherein the carrier can be cyclic group or acyclic group. In one embodiment, the cyclic group is selected from pyrrolidinyl, pyrazolinyl, pyrazolidinyl, imidazolinyl, imidazolidinyl, piperidinyl, piperazinyl, [1,3]dioxolane, oxazolidinyl, isoxazolidinyl, morpholinyl, thiazolidinyl, isothiazolidinyl, quinoxalinyl, pyridazinonyl, tetrahydrofuryl and decalin. In another embodiment, the acyclic group is selected from serinol backbone or diethanolamine backbone.

[0476] In certain specific embodiments, the RNAi agent for use in the methods of the disclosure is an agent selected from the group of agents listed in any one of Tables 2-3 and 5-6. These agents may further comprise a ligand, such as one or more lipophilic moieties, one or more GalNAc derivatives, or both of one of more lipophilic moieties and one or more GalNAc derivatives.

### IV. iRNAs Conjugated to Ligands

[0477] Another modification of the RNA of an iRNA of the invention involves chemically linking to the iRNA one or more ligands, moieties or conjugates that enhance the activity, cellular distribution or cellular uptake of the iRNA into a cell. Such moieties include but are not limited to lipid moieties such as a cholesterol moiety (Letsinger et al., Proc. Natl. Acid. Sci. USA, 1989, 86: 6553-6556), cholic acid (Manoharan et al., Biorg. Med. Chem. Let., 1994, 4:1053-1060), a thioether, e.g., beryl-S-tritylthiol (Manoharan et al., Ann. N. Y. Acad. Sci., 1992, 660:306-309; Manoharan et al., Biorg. Med. Chem. Let., 1993, 3:2765-2770), a thiocholesterol (Oberhauser et al., Nucl. Acids Res., 1992, 20:533-538), an aliphatic chain, e.g., dodecandiol or undecyl residues (Saison-Behmoaras et al., EMBO J, 1991, 10:1111-1118; Kabanov et al., FEBS Lett., 1990, 259:327-330; Svinarchuk et al., Biochimie, 1993, 75:49-54), a phospholipid, e.g., di-hexadecyl-rac-glycerol or triethyl-ammonium 1,2-di-O-hexadecyl-rac-glycero-3-phosphonate (Manoharan et al., Tetrahedron Lett., 1995, 36:3651-3654; Shea et al., Nucl. Acids Res., 1990, 18:3777-3783), a polyamine or a polyethylene glycol chain (Manoharan et al., Nucleosides & Nucleotides, 1995, 14:969-973), or adamantane acetic acid (Manoharan et al., Tetrahedron Lett., 1995, 36:3651-3654), a palmityl moiety (Mishra et al., Biochim. Biophys. Acta, 1995, 1264:229-237), or an octadecylamine or hexylamino-carbonyloxycholesterol moiety (Crooke et al., J. Pharmacol. Exp. Ther., 1996, 277:923-937).

[0478] In certain embodiments, a ligand alters the distribution, targeting or lifetime of an iRNA agent into which it is incorporated. In some embodiments, a ligand provides an enhanced affinity for a selected target, e.g., molecule, cell or cell type, compartment, e.g., a cellular or organ compartment, tissue, organ or region of the body, as, e.g., compared to a species absent such a ligand. Typical ligands will not take part in duplex pairing in a duplexed nucleic acid.

[0479] Ligands can include a naturally occurring substance, such as a protein (e.g., human serum albumin (HSA), low-density lipoprotein (LDL), or globulin); carbohydrate (e.g., a dextran, pullulan, chitin, chitosan, inulin, cyclodextrin or hyaluronic acid); or a lipid. The ligand may also be a recombinant or synthetic molecule, such as a synthetic polymer, e.g., a synthetic polyamino acid. Examples of polyamino acids include polyamino acid is a polylysine (PLL), poly L-aspartic acid, poly L-glutamic acid, styrene-maleic acid anhydride copolymer, poly(L-lactide-co-glycolied) copolymer, divinyl ether-maleic anhydride copolymer, N-(2-hydroxypropyl)methacrylamide copolymer (HMPA), polyethylene glycol (PEG), polyvinyl alcohol (PVA), polyurethane, poly(2-ethylacryllic acid), N-isopropylacrylamide polymers, or polyphosphazine. Example of polyamines include: polyethylenimine, polylysine (PLL), spermine, spermidine, polyamine, pseudopeptide-polyamine, peptidomimetic polyamine, dendrimer polyamine, arginine, amidine, protamine, cationic lipid, cationic porphyrin, quaternary salt of a polyamine, or an α helical peptide.

[0480] Ligands can also include targeting groups, e.g., a cell or tissue targeting agent, e.g., a lectin, glycoprotein, lipid or protein, e.g., an antibody, that binds to a specified cell type such as a kidney cell. A targeting group can be a thyrotropin, melanotropin, lectin, glycoprotein, surfactant protein A, Mucin carbohydrate, multivalent lactose, multivalent galactose, N-acetyl-galactosamine, N-acetyl-glucosamine multivalent mannose, multivalent fucose, glycosylated polyaminoacids, multivalent galactose, transferrin, bisphosphonate, polyglutamate, polyaspartate, a lipid, cholesterol, a steroid, bile acid, folate, vitamin B12, biotin, or an RGD peptide or RGD peptide mimetic. In certain embodiments, the ligand is a multivalent galactose, e.g., an N-acetyl-galactosamine.

[0481] Other examples of ligands include dyes, intercalating agents (e.g. acridines), cross-linkers (e.g. psoralene, mitomycin C), porphyrins (TPPC4, texaphyrin, Sapphyrin), polycyclic aromatic hydrocarbons (e.g., phenazine, dihydrophenazine), artificial endonucleases (e.g. EDTA), lipophilic molecules, e.g., cholesterol, cholic acid, adamantane acetic acid, 1-pyrene butyric acid, dihydrotestosterone, 1,3-Bis-O(hexadecyl)glycerol, geranyloxyhexyl group, hexadecylglycerol, borneol, menthol, 1,3-propanediol, heptadecyl group, palmitic acid, myristic acid, O3-(oleoyl)lithocholic acid, O3-(oleoyl)cholenic acid, dimethoxytrityl, or phenoxazine) and peptide conjugates (e.g., antennapedia peptide, Tat peptide), alkylating agents, phosphate, amino, mercapto, PEG (e.g., PEG-40K), MPEG, [MPEG]₂, polyamino, alkyl, substituted alkyl, radiolabeled markers, enzymes, haptens (e.g. biotin), transport/absorption facilitators (e.g., aspirin, vitamin E, folic acid), synthetic ribonucleases (e.g., imidazole, bisimidazole, histamine, imidazole clusters, acridine-imidazole conjugates, Eu3+ complexes of tetraazamacrocycles), dinitrophenyl, HRP, or AP.

[0482] Ligands can be proteins, e.g., glycoproteins, or peptides, e.g., molecules having a specific affinity for a co-ligand, or antibodies e.g., an antibody, that binds to a specified cell type such as a cancer cell, endothelial cell, or bone cell. Ligands may also include hormones and hormone receptors. They can also include non-peptidic species, such as lipids, lectins, carbohydrates, vitamins, cofactors, multivalent lactose, multivalent galactose, N-acetyl-galactosamine, N-acetyl-glucosamine multivalent mannose, or multivalent fucose. The ligand can be, for example, a lipopolysaccharide, an activator of p38 MAP kinase, or an activator of NF-κB.

[0483] The ligand can be a substance, e.g., a drug, which can increase the uptake of the iRNA agent into the cell, for example, by disrupting the cell's cytoskeleton, e.g., by disrupting the cell's microtubules, microfilaments, or intermediate filaments. The drug can be, for example, taxon, vincristine, vinblastine, cytochalasin, nocodazole, japlakinolide, latrunculin A, phalloidin, swinholide A, indanocine, or myoservin.

[0484] In some embodiments, a ligand attached to an iRNA as described herein acts as a pharmacokinetic modulator (PK modulator). PK modulators include lipophiles, bile acids, steroids, phospholipid analogues, peptides, protein binding agents, PEG, vitamins etc. Exemplary PK modulators include, but are not limited to, cholesterol, fatty acids, cholic acid, lithocholic acid, dialkylglycerides, diacylglyceride, phospholipids, sphingolipids, naproxen, ibuprofen, vitamin E, biotin etc. Oligonucleotides that comprise a number of phosphorothioate linkages are also known to bind to serum protein, thus short oligonucleotides, e.g., oligonucleotides of about 5 bases, 10 bases, 15 bases or 20 bases, comprising multiple of phosphorothioate linkages in the backbone are also amenable to the present invention as ligands (e.g. as PK modulating ligands). In addition, aptamers that bind serum components (e.g. serum proteins) are also suitable for use as PK modulating ligands in the embodiments described herein.

[0485] Ligand-conjugated iRNAs of the invention may be synthesized by the use of an oligonucleotide that bears a pendant reactive functionality, such as that derived from the attachment of a linking molecule onto the oligonucleotide (described below). This reactive oligonucleotide may be reacted directly with commercially-available ligands, ligands that are synthesized bearing any of a variety of protecting groups, or ligands that have a linking moiety attached thereto.

[0486] The oligonucleotides used in the conjugates of the present invention may be conveniently and routinely made through the well-known technique of solid-phase synthesis. Equipment for such synthesis is sold by several vendors including, for example, Applied Biosystems® (Foster City, Calif.). Any other means for such synthesis known in the art may additionally or alternatively be employed. It is also known to use similar techniques to prepare other oligonucleotides, such as the phosphorothioates and alkylated derivatives.

[0487] In the ligand-conjugated oligonucleotides and ligand-molecule bearing sequence-specific linked nucleosides of the present invention, the oligonucleotides and oligonucleosides may be assembled on a suitable DNA synthesizer utilizing standard nucleotide or nucleoside precursors, or nucleotide or nucleoside conjugate precursors that already bear the linking moiety, ligand-nucleotide or nucleoside-conjugate precursors that already bear the ligand molecule, or non-nucleoside ligand-bearing building blocks.

[0488] When using nucleotide-conjugate precursors that already bear a linking moiety, the synthesis of the sequence-specific linked nucleosides is typically completed, and the ligand molecule is then reacted with the linking moiety to form the ligand-conjugated oligonucleotide. In some embodiments, the oligonucleotides or linked nucleosides of the present invention are synthesized by an automated synthesizer using phosphoramidites derived from ligand-nucleoside conjugates in addition to the standard phosphoramidites and non-standard phosphoramidites that are commercially available and routinely used in oligonucleotide synthesis.

[0489] A. Lipid Conjugates

[0490] In certain embodiments, the ligand or conjugate is a lipid or lipid-based molecule. Such a lipid or lipid-based molecule can typically bind a serum protein, such as human serum albumin (HSA). An HSA binding ligand allows for distribution of the conjugate to a target tissue, e.g., a non-kidney target tissue of the body. For example, the target tissue can be the liver, including parenchymal cells of the liver. Other molecules that can bind HSA can also be used as ligands. For example, naproxen or aspirin can be used. A lipid or lipid-based ligand can (a) increase resistance to degradation of the conjugate, (b) increase targeting or transport into a target cell or cell membrane, or (c) can be used to adjust binding to a serum protein, e.g., HSA.

[0491] A lipid-based ligand can be used to modulate, e.g., control (e.g., inhibit) the binding of the conjugate to a target tissue. For example, a lipid or lipid-based ligand that binds to HSA more strongly will be less likely to be targeted to the kidney and therefore less likely to be cleared from the body. A lipid or lipid-based ligand that binds to HSA less strongly can be used to target the conjugate to the kidney.

[0492] In certain embodiments, the lipid-based ligand binds HSA. For example, the ligand can bind HSA with a sufficient affinity such that distribution of the conjugate to a non-kidney tissue is enhanced. However, the affinity is typically not so strong that the HSA-ligand binding cannot be reversed.

[0493] In certain embodiments, the lipid-based ligand binds HSA weakly or not at all, such that distribution of the conjugate to the kidney is enhanced. Other moieties that target to kidney cells can also be used in place of or in addition to the lipid-based ligand.

[0494] In another aspect, the ligand is a moiety, e.g., a vitamin, which is taken up by a target cell, e.g., a proliferating cell. These are particularly useful for treating disorders characterized by unwanted cell proliferation, e.g., of the malignant or non-malignant type, e.g., cancer cells. Exemplary vitamins include vitamin A, E, and K. Other exemplary vitamins include are B vitamin, e.g., folic acid, B12, riboflavin, biotin, pyridoxal or other vitamins or nutrients taken up by cancer cells. Also included are HSA and low density lipoprotein (LDL).

[0495] B. Cell Permeation Agents

[0496] In another aspect, the ligand is a cell-permeation agent, such as a helical cell-permeation agent. In certain embodiments, the agent is amphipathic. An exemplary agent is a peptide such as tat or antennopedia. If the agent is a peptide, it can be modified, including a peptidylmimetic, invertomers, non-peptide or pseudo-peptide linkages, and use of D-amino acids. The helical agent is typically an α-helical agent and can have a lipophilic and a lipophobic phase.

[0497] The ligand can be a peptide or peptidomimetic. A peptidomimetic (also referred to herein as an oligopeptidomimetic) is a molecule capable of folding into a defined three-dimensional structure similar to a natural peptide. The attachment of peptide and peptidomimetics to iRNA agents can affect pharmacokinetic distribution of the iRNA, such as by enhancing cellular recognition and absorption. The peptide or peptidomimetic moiety can be about 5-50 amino acids long, e.g., about 5, 10, 15, 20, 25, 30, 35, 40, 45, or 50 amino acids long.

[0498] A peptide or peptidomimetic can be, for example, a cell permeation peptide, cationic peptide, amphipathic peptide, or hydrophobic peptide (e.g., consisting primarily of Tyr, Trp, or Phe). The peptide moiety can be a dendrimer peptide, constrained peptide or crosslinked peptide. In another alternative, the peptide moiety can include a hydrophobic membrane translocation sequence (MTS). An exemplary hydrophobic MTS-containing peptide is RFGF having the amino acid sequence AAVALLPAVLLALLAP (SEQ ID NO:31). An RFGF analogue (e.g., amino acid sequence AALLPVLLAAP (SEQ ID NO:32)) containing a hydrophobic MTS can also be a targeting moiety. The peptide moiety can be a “delivery” peptide, which can carry large polar molecules including peptides, oligonucleotides, and protein across cell membranes. For example, sequences from the HIV Tat protein (GRKKRRQRRRPPQ (SEQ ID NO:33)) and the Drosophila Antennapedia protein (RQIKIWFQNRRMKWKK (SEQ ID NO:34)) have been found to be capable of functioning as delivery peptides. A peptide or peptidomimetic can be encoded by a random sequence of DNA, such as a peptide identified from a phage-display library, or one-bead-one-compound (OBOC) combinatorial library (Lam et al., Nature, 354:82-84, 1991). Typically, the peptide or peptidomimetic tethered to a dsRNA agent via an incorporated monomer unit is a cell targeting peptide such as an arginine-glycine-aspartic acid (RGD)-peptide, or RGD mimic. A peptide moiety can range in length from about 5 amino acids to about 40 amino acids. The peptide moieties can have a structural modification, such as to increase stability or direct conformational properties. Any of the structural modifications described below can be utilized.

[0499] An RGD peptide for use in the compositions and methods of the invention may be linear or cyclic, and may be modified, e.g., glycosylated or methylated, to facilitate targeting to a specific tissue(s). RGD-containing peptides and peptidiomimemtics may include D-amino acids, as well as synthetic RGD mimics. In addition to RGD, one can use other moieties that target the integrin ligand, such as PECAM-1 or VEGF.

[0500] An RGD peptide moiety can be used to target a particular cell type, e.g., a tumor cell, such as an endothelial tumor cell or a breast cancer tumor cell (Zitzmann et al., Cancer Res., 62:5139-43, 2002). An RGD peptide can facilitate targeting of an dsRNA agent to tumors of a variety of other tissues, including the lung, kidney, spleen, or liver (Aoki et al., Cancer Gene Therapy 8:783-787, 2001). Typically, the RGD peptide will facilitate targeting of an iRNA agent to the kidney. The RGD peptide can be linear or cyclic, and can be modified, e.g., glycosylated or methylated to facilitate targeting to specific tissues. For example, a glycosylated RGD peptide can deliver an iRNA agent to a tumor cell expressing α_{V}β₃ (Haubner et al., Jour. Nucl. Med., 42:326-336, 2001).

[0501] A “cell permeation peptide” is capable of permeating a cell, e.g., a microbial cell, such as a bacterial or fungal cell, or a mammalian cell, such as a human cell. A microbial cell-permeating peptide can be, for example, an α-helical linear peptide (e.g., LL-37 or Ceropin P1), a disulfide bond-containing peptide (e.g., α-defensin, β-defensin or bactenecin), or a peptide containing only one or two dominating amino acids (e.g., PR-39 or indolicidin). A cell permeation peptide can also include a nuclear localization signal (NLS). For example, a cell permeation peptide can be a bipartite amphipathic peptide, such as MPG, which is derived from the fusion peptide domain of HIV-1 gp41 and the NLS of SV40 large T antigen (Simeoni et al., Nucl. Acids Res. 31:2717-2724, 2003).

[0502] C. Carbohydrate Conjugates

[0503] In some embodiments of the compositions and methods of the invention, an iRNA further comprises a carbohydrate. The carbohydrate conjugated iRNA are advantageous for the in vivo delivery of nucleic acids, as well as compositions suitable for in vivo therapeutic use, as described herein. As used herein, “carbohydrate” refers to a compound which is either a carbohydrate per se made up of one or more monosaccharide units having at least 6 carbon atoms (which can be linear, branched or cyclic) with an oxygen, nitrogen or sulfur atom bonded to each carbon atom; or a compound having as a part thereof a carbohydrate moiety made up of one or more monosaccharide units each having at least six carbon atoms (which can be linear, branched or cyclic), with an oxygen, nitrogen or sulfur atom bonded to each carbon atom. Representative carbohydrates include the sugars (mono-, di-, tri- and oligosaccharides containing from about 4, 5, 6, 7, 8, or 9 monosaccharide units), and polysaccharides such as starches, glycogen, cellulose and polysaccharide gums. Specific monosaccharides include C5 and above (e.g., C5, C6, C7, or C8) sugars; di- and tri-saccharides include sugars having two or three monosaccharide units (e.g., C5, C6, C7, or C8).

[0504] In certain embodiments, a carbohydrate conjugate comprises a monosaccharide.

[0505] In certain embodiments, the monosaccharide is an N-acetylgalactosamine (GalNAc). GalNAc conjugates, which comprise one or more N-acetylgalactosamine (GalNAc) derivatives, are described, for example, in U.S. Pat. No. 8,106,022, the entire content of which is hereby incorporated herein by reference. In some embodiments, the GalNAc conjugate serves as a ligand that targets the iRNA to particular cells. In some embodiments, the GalNAc conjugate targets the iRNA to liver cells, e.g., by serving as a ligand for the asialoglycoprotein receptor of liver cells (e.g., hepatocytes).

[0506] In some embodiments, the carbohydrate conjugate comprises one or more GalNAc derivatives. The GalNAc derivatives may be attached via a linker, e.g., a bivalent or trivalent branched linker. In some embodiments the GalNAc conjugate is conjugated to the 3′ end of the sense strand. In some embodiments, the GalNAc conjugate is conjugated to the iRNA agent (e.g., to the 3′ end of the sense strand) via a linker, e.g., a linker as described herein. In some embodiments the GalNAc conjugate is conjugated to the 5′ end of the sense strand. In some embodiments, the GalNAc conjugate is conjugated to the iRNA agent (e.g., to the 5′ end of the sense strand) via a linker, e.g., a linker as described herein.

[0507] In certain embodiments of the invention, the GalNAc or GalNAc derivative is attached to an iRNA agent of the invention via a monovalent linker. In some embodiments, the GalNAc or GalNAc derivative is attached to an iRNA agent of the invention via a bivalent linker. In yet other embodiments of the invention, the GalNAc or GalNAc derivative is attached to an iRNA agent of the invention via a trivalent linker. In other embodiments of the invention, the GalNAc or GalNAc derivative is attached to an iRNA agent of the invention via a tetravalent linker.

[0508] In certain embodiments, the double stranded RNAi agents of the invention comprise one GalNAc or GalNAc derivative attached to the iRNA agent. In certain embodiments, the double stranded RNAi agents of the invention comprise a plurality (e.g., 2, 3, 4, 5, or 6) GalNAc or GalNAc derivatives, each independently attached to a plurality of nucleotides of the double stranded RNAi agent through a plurality of monovalent linkers.

[0509] In some embodiments, for example, when the two strands of an iRNA agent of the invention are part of one larger molecule connected by an uninterrupted chain of nucleotides between the 3′-end of one strand and the 5′-end of the respective other strand forming a hairpin loop comprising, a plurality of unpaired nucleotides, each unpaired nucleotide within the hairpin loop may independently comprise a GalNAc or GalNAc derivative attached via a monovalent linker. The hairpin loop may also be formed by an extended overhang in one strand of the duplex.

[0510] In some embodiments, for example, when the two strands of an iRNA agent of the invention are part of one larger molecule connected by an uninterrupted chain of nucleotides between the 3′-end of one strand and the 5′-end of the respective other strand forming a hairpin loop comprising, a plurality of unpaired nucleotides, each unpaired nucleotide within the hairpin loop may independently comprise a GalNAc or GalNAc derivative attached via a monovalent linker. The hairpin loop may also be formed by an extended overhang in one strand of the duplex.

[0511] In some embodiments, the GalNAc conjugate is

[chemical structure]

[0512] In some embodiments, the RNAi agent is attached to the carbohydrate conjugate via a linker as shown in the following schematic, wherein X is O or S

[chemical structure]

[0513] In some embodiments, the RNAi agent is conjugated to L96 as defined in Table 1 and shown below:

[chemical structure]

[0514] In certain embodiments, a carbohydrate conjugate for use in the compositions and methods of the invention is selected from the group consisting of:

[chemical structure]

[chemical structure]

[chemical structure]

[chemical structure]

[chemical structure]

[chemical structure]

[chemical structure]

[0515] In certain embodiments, a carbohydrate conjugate for use in the compositions and methods of the invention is a monosaccharide. In certain embodiments, the monosaccharide is an N-acetylgalactosamine, such as

[chemical structure]

[0516] Another representative carbohydrate conjugate for use in the embodiments described herein includes, but is not limited to,

[chemical structure]

[0517] when one of X or Y is an oligonucleotide, the other is a hydrogen.

[0518] In some embodiments, a suitable ligand is a ligand disclosed in WO 2019/055633, the entire contents of which are incorporated herein by reference. In one embodiment the ligand comprises the structure below:

[chemical structure]

[0519] In certain embodiments, the RNAi agents of the disclosure may include GalNAc ligands.

[0520] In certain embodiments of the invention, the GalNAc or GalNAc derivative is attached to an iRNA agent of the invention via a monovalent linker. In some embodiments, the GalNAc or GalNAc derivative is attached to an iRNA agent of the invention via a bivalent linker. In yet other embodiments of the invention, the GalNAc or GalNAc derivative is attached to an iRNA agent of the invention via a trivalent linker. In other embodiments of the invention, the GalNAc or GalNAc derivative is attached to an iRNA agent of the invention via a tetravalent linker.

[0521] In certain embodiments, the double stranded RNAi agents of the invention comprise one GalNAc or GalNAc derivative attached to the iRNA agent, e.g., the 5′end of the sense strand of a dsRNA agent, or the 5′ end of one or both sense strands of a dual targeting RNAi agent as described herein. In certain embodiments, the double stranded RNAi agents of the invention comprise a plurality (e.g., 2, 3, 4, 5, or 6) GalNAc or GalNAc derivatives, each independently attached to a plurality of nucleotides of the double stranded RNAi agent through a plurality of monovalent linkers.

[0522] In some embodiments, for example, when the two strands of an iRNA agent of the invention are part of one larger molecule connected by an uninterrupted chain of nucleotides between the 3′-end of one strand and the 5′-end of the respective other strand forming a hairpin loop comprising, a plurality of unpaired nucleotides, each unpaired nucleotide within the hairpin loop may independently comprise a GalNAc or GalNAc derivative attached via a monovalent linker.

[0523] In some embodiments, the carbohydrate conjugate further comprises one or more additional ligands as described above, such as, but not limited to, a PK modulator or a cell permeation peptide.

[0524] Additional carbohydrate conjugates and linkers suitable for use in the present invention include those described in WO 2014/179620 and WO 2014/179627, the entire contents of each of which are incorporated herein by reference.

[0525] D. Linkers

[0526] In some embodiments, the conjugate or ligand described herein can be attached to an iRNA oligonucleotide with various linkers that can be cleavable or non-cleavable.

[0527] The term “linker” or “linking group” means an organic moiety that connects two parts of a compound, e.g., covalently attaches two parts of a compound. Linkers typically comprise a direct bond or an atom such as oxygen or sulfur, a unit such as NR8, C(O), C(O)NH, SO, SO₂, SO₂NH or a chain of atoms, such as, but not limited to, substituted or unsubstituted alkyl, substituted or unsubstituted alkenyl, substituted or unsubstituted alkynyl, arylalkyl, arylalkenyl, arylalkynyl, heteroarylalkyl, heteroarylalkenyl, heteroarylalkynyl, heterocyclylalkyl, heterocyclylalkenyl, heterocyclylalkynyl, aryl, heteroaryl, heterocyclyl, cycloalkyl, cycloalkenyl, alkylarylalkyl, alkylarylalkenyl, alkylarylalkynyl, alkenylarylalkyl, alkenylarylalkenyl, alkenylarylalkynyl, alkynylarylalkyl, alkynylarylalkenyl, alkynylarylalkynyl, alkylheteroarylalkyl, alkylheteroarylalkenyl, alkylheteroarylalkynyl, alkenylheteroarylalkyl, alkenylheteroarylalkenyl, alkenylheteroarylalkynyl, alkynylheteroarylalkyl, alkynylheteroarylalkenyl, alkynylheteroarylalkynyl, alkylheterocyclylalkyl, alkylheterocyclylalkenyl, alkylhererocyclylalkynyl, alkenylheterocyclylalkyl, alkenylheterocyclylalkenyl, alkenylheterocyclylalkynyl, alkynylheterocyclylalkyl, alkynylheterocyclylalkenyl, alkynylheterocyclylalkynyl, alkylaryl, alkenylaryl, alkynylaryl, alkylheteroaryl, alkenylheteroaryl, alkynylhereroaryl, which one or more methylenes can be interrupted or terminated by O, S, S(O), SO₂, N(R8), C(O), substituted or unsubstituted aryl, substituted or unsubstituted heteroaryl, substituted or unsubstituted heterocyclic; where R8 is hydrogen, acyl, aliphatic or substituted aliphatic. In certain embodiments, the linker is between about 1-24 atoms, 2-24, 3-24, 4-24, 5-24, 6-24, 6-18, 7-18, 8-18 atoms, 7-17, 8-17, 6-16, 7-16, or 8-16 atoms.

[0528] A cleavable linking group is one which is sufficiently stable outside the cell, but which upon entry into a target cell is cleaved to release the two parts the linker is holding together. In one embodiment, the cleavable linking group is cleaved at least about 10 times, 20, times, 30 times, 40 times, 50 times, 60 times, 70 times, 80 times, 90 times or more, or at least about 100 times faster in a target cell or under a first reference condition (which can, e.g., be selected to mimic or represent intracellular conditions) than in the blood of a subject, or under a second reference condition (which can, e.g., be selected to mimic or represent conditions found in the blood or serum).

[0529] Cleavable linking groups are susceptible to cleavage agents, e.g., pH, redox potential or the presence of degradative molecules. Generally, cleavage agents are more prevalent or found at higher levels or activities inside cells than in serum or blood. Examples of such degradative agents include: redox agents which are selected for particular substrates or which have no substrate specificity, including, e.g., oxidative or reductive enzymes or reductive agents such as mercaptans, present in cells, that can degrade a redox cleavable linking group by reduction; esterases; endosomes or agents that can create an acidic environment, e.g., those that result in a pH of five or lower; enzymes that can hydrolyze or degrade an acid cleavable linking group by acting as a general acid, peptidases (which can be substrate specific), and phosphatases.

[0530] A cleavable linkage group, such as a disulfide bond can be susceptible to pH. The pH of human serum is 7.4, while the average intracellular pH is slightly lower, ranging from about 7.1-7.3. Endosomes have a more acidic pH, in the range of 5.5-6.0, and lysosomes have an even more acidic pH at around 5.0. Some linkers will have a cleavable linking group that is cleaved at a selected pH, thereby releasing a cationic lipid from the ligand inside the cell, or into the desired compartment of the cell.

[0531] A linker can include a cleavable linking group that is cleavable by a particular enzyme. The type of cleavable linking group incorporated into a linker can depend on the cell to be targeted. For example, a liver-targeting ligand can be linked to a cationic lipid through a linker that includes an ester group. Liver cells are rich in esterases, and therefore the linker will be cleaved more efficiently in liver cells than in cell types that are not esterase-rich. Other cell-types rich in esterases include cells of the lung, renal cortex, and testis.

[0532] Linkers that contain peptide bonds can be used when targeting cell types rich in peptidases, such as liver cells and synoviocytes.

[0533] In general, the suitability of a candidate cleavable linking group can be evaluated by testing the ability of a degradative agent (or condition) to cleave the candidate linking group. It will also be desirable to also test the candidate cleavable linking group for the ability to resist cleavage in the blood or when in contact with other non-target tissue. Thus, one can determine the relative susceptibility to cleavage between a first and a second condition, where the first is selected to be indicative of cleavage in a target cell and the second is selected to be indicative of cleavage in other tissues or biological fluids, e.g., blood or serum. The evaluations can be carried out in cell free systems, in cells, in cell culture, in organ or tissue culture, or in whole animals. It can be useful to make initial evaluations in cell-free or culture conditions and to confirm by further evaluations in whole animals. In certain embodiments, useful candidate compounds are cleaved at least about 2, 4, 10, 20, 30, 40, 50, 60, 70, 80, 90, or about 100 times faster in the cell (or under in vitro conditions selected to mimic intracellular conditions) as compared to blood or serum (or under in vitro conditions selected to mimic extracellular conditions).

[0534] i. Redox Cleavable Linking Groups

[0535] In certain embodiments, a cleavable linking group is a redox cleavable linking group that is cleaved upon reduction or oxidation. An example of reductively cleavable linking group is a disulphide linking group (—S—S—). To determine if a candidate cleavable linking group is a suitable “reductively cleavable linking group,” or for example is suitable for use with a particular iRNA moiety and particular targeting agent one can look to methods described herein. For example, a candidate can be evaluated by incubation with dithiothreitol (DTT), or other reducing agent using reagents know in the art, which mimic the rate of cleavage which would be observed in a cell, e.g., a target cell. The candidates can also be evaluated under conditions which are selected to mimic blood or serum conditions. In one, candidate compounds are cleaved by at most about 10% in the blood. In other embodiments, useful candidate compounds are degraded at least about 2, 4, 10, 20, 30, 40, 50, 60, 70, 80, 90, or about 100 times faster in the cell (or under in vitro conditions selected to mimic intracellular conditions) as compared to blood (or under in vitro conditions selected to mimic extracellular conditions). The rate of cleavage of candidate compounds can be determined using standard enzyme kinetics assays under conditions chosen to mimic intracellular media and compared to conditions chosen to mimic extracellular media.

[0536] ii. Phosphate-Based Cleavable Linking Groups

[0537] In certain embodiments, a cleavable linker comprises a phosphate-based cleavable linking group. A phosphate-based cleavable linking group is cleaved by agents that degrade or hydrolyze the phosphate group. An example of an agent that cleaves phosphate groups in cells are enzymes such as phosphatases in cells. Examples of phosphate-based linking groups are —O—P(O)(ORk)-O—, —O—P(S)(ORk)-O—, —O—P(S)(SRk)-O—, —S—P(O)(ORk)-O—, —O—P(O)(ORk)-S—, —S—P(O)(ORk)-S—, —O—P(S)(ORk)-S—, —S—P(S)(ORk)-O—, —O—P(O)(Rk)-O—, —O—P(S)(Rk)-O—, —S—P(O)(Rk)-O—, —S—P(S)(Rk)-O—, —S—P(O)(Rk)-S—, —O—P(S)(Rk)-S, wherein Rk at each occurrence can be, independently, C1-C20 alkyl, C1-C20 haloalkyl, C6-C10 aryl, or C7-C12 aralkyl. Exemplary embodiments include —O—P(O)(OH)—O—, —O—P(S)(OH)—O—, —O—P(S)(SH)—O—, —S—P(O)(OH)—O—, —O—P(O)(OH)—S—, —S—P(O)(OH)—S—, —O—P(S)(OH)—S—, —S—P(S)(OH)—O—, —O—P(O)(H)—O—, —O—P(S)(H)—O—, —S—P(O)(H)—O, —S—P(S)(H)—O—, —S—P(O)(H)—S—, and —O—P(S)(H)—S—. in certain embodiments, a phosphate-based linking group is —O—P(O)(OH)—O—. These candidates can be evaluated using methods analogous to those described above.

[0538] iii. Acid Cleavable Linking Groups

[0539] In certain embodiments, a cleavable linker comprises an acid cleavable linking group. An acid cleavable linking group is a linking group that is cleaved under acidic conditions. In other embodiments acid cleavable linking groups are cleaved in an acidic environment with a pH of about 6.5 or lower (e.g., about 6.0, 5.75, 5.5, 5.25, 5.0, or lower), or by agents such as enzymes that can act as a general acid. In a cell, specific low pH organelles, such as endosomes and lysosomes can provide a cleaving environment for acid cleavable linking groups. Examples of acid cleavable linking groups include but are not limited to hydrazones, esters, and esters of amino acids. Acid cleavable groups can have the general formula —C═NN—, C(O)O, or —OC(O). An exemplary embodiment is when the carbon attached to the oxygen of the ester (the alkoxy group) is an aryl group, substituted alkyl group, or tertiary alkyl group such as dimethyl pentyl or t-butyl. These candidates can be evaluated using methods analogous to those described above.

[0540] iv. Ester-Based Cleavable Linking Groups

[0541] In certain embodiments, a cleavable linker comprises an ester-based cleavable linking group. An ester-based cleavable linking group is cleaved by enzymes such as esterases and amidases in cells. Examples of ester-based cleavable linking groups include but are not limited to esters of alkylene, alkenylene and alkynylene groups. Ester cleavable linking groups have the general formula —C(O)O—, or —OC(O)—. These candidates can be evaluated using methods analogous to those described above.

[0542] v. Peptide-Based Cleavable Linking Groups

[0543] In yet another embodiment, a cleavable linker comprises a peptide-based cleavable linking group. A peptide-based cleavable linking group is cleaved by enzymes such as peptidases and proteases in cells. Peptide-based cleavable linking groups are peptide bonds formed between amino acids to yield oligopeptides (e.g., dipeptides, tripeptides etc.) and polypeptides. Peptide-based cleavable groups do not include the amide group (—C(O)NH—). The amide group can be formed between any alkylene, alkenylene or alkynelene. A peptide bond is a special type of amide bond formed between amino acids to yield peptides and proteins. The peptide based cleavage group is generally limited to the peptide bond (i.e., the amide bond) formed between amino acids yielding peptides and proteins and does not include the entire amide functional group. Peptide-based cleavable linking groups have the general formula —NHCHRAC(O)NHCHRBC(O)—, where RA and RB are the R groups of the two adjacent amino acids. These candidates can be evaluated using methods analogous to those described above.

[0544] In some embodiments, an iRNA of the invention is conjugated to a carbohydrate through a linker. Non-limiting examples of iRNA carbohydrate conjugates with linkers of the compositions and methods of the invention include, but are not limited to,

[chemical structure]

[chemical structure]

[chemical structure]

when one of X or Y is an oligonucleotide, the other is a hydrogen.

[0545] In certain embodiments of the compositions and methods of the invention, a ligand is one or more “GalNAc” (N-acetylgalactosamine) derivatives attached through a bivalent or trivalent branched linker.

[0546] In certain embodiments, a dsRNA of the invention is conjugated to a bivalent or trivalent branched linker selected from the group of structures shown in any of formula (XLV)-(XLVI):

[chemical structure]

[0547] wherein:
[0548] q2A, q2B, q3A, q3B, q4A, q4B, q5A, q5B and q5C represent independently for each occurrence 0-20 and wherein the repeating unit can be the same or different;
[0549] P^{2A}, P^{2B}, P^{3A}, P^{3B}, P^{4A}, P^{4B}, P^{5A}, P^{5B}, P^{5C}, T^{2A}, T^{2B}, T^{3A}, T^{3B}, T^{4A}, T^{4B}, T^{4A}, T^{5B}, T^{5C} are each independently for each occurrence absent, CO, NH, O, S, OC(O), NHC(O), CH₂, CH₂NH or CH₂O;
[0550] Q^{2A}, Q^{2B}, Q^{3A}, Q^{3B}, Q^{4A}, Q^{4B}, Q^{5A}, Q^{5B}, Q^{5C} are independently for each occurrence absent, alkylene, substituted alkylene wherein one or more methylenes can be interrupted or terminated by one or more of O, S, S(O), SO₂, N(R^{N}), C(R′)═C(R″), C≡C or C(O);
[0551] R^{2A}, R^{2B}, R^{3A}, R^{3B}, R^{4A}, R^{4B}, R^{5A}, R^{5B}, R⁵C are each independently for each occurrence absent, NH, O,-S, CH₂, C(O)O, C(O)NH, NHCH(R^{a})C(O), —C(O)—CH(R^{a})—NH—, CO, CH═N-O,

[chemical structure]

or heterocyclyl;
[0552] L^{2A}, L^{2B}, L^{3A}, L^{3B}, L^{4A}, L^{4B}, L^{5A}, L^{5B} and L^{5C} represent the ligand; i.e. each independently for each occurrence a monosaccharide (such as GalNAc), disaccharide, trisaccharide, tetrasaccharide, oligosaccharide, or polysaccharide; and R^{a} is H or amino acid side chain. Trivalent conjugating GalNAc derivatives are particularly useful for use with RNAi agents for inhibiting the expression of a target gene, such as those of formula (XLIX):

[chemical structure]

[0553] wherein L^{5A}, L^{5B} and L^{5C} represent a monosaccharide, such as GalNAc derivative.

[0554] Examples of suitable bivalent and trivalent branched linker groups conjugating GalNAc derivatives include, but are not limited to, the structures recited above as formulas II, VII, XI, X, and XIII.

[0555] Representative U.S. patents that teach the preparation of RNA conjugates include, but are not limited to, U.S. Pat. Nos. 4,828,979; 4,948,882; 5,218,105; 5,525,465; 5,541,313; 5,545,730; 5,552,538; 5,578,717, 5,580,731; 5,591,584; 5,109,124; 5,118,802; 5,138,045; 5,414,077; 5,486,603; 5,512,439; 5,578,718; 5,608,046; 4,587,044; 4,605,735; 4,667,025; 4,762,779; 4,789,737; 4,824,941; 4,835,263; 4,876,335; 4,904,582; 4,958,013; 5,082,830; 5,112,963; 5,214,136; 5,082,830; 5,112,963; 5,214,136; 5,245,022; 5,254,469; 5,258,506; 5,262,536; 5,272,250; 5,292,873; 5,317,098; 5,371,241, 5,391,723; 5,416,203, 5,451,463; 5,510,475; 5,512,667; 5,514,785; 5,565,552; 5,567,810; 5,574,142; 5,585,481; 5,587,371; 5,595,726; 5,597,696; 5,599,923; 5,599,928; 5,688,941; 6,294,664; 6,320,017; 6,576,752; 6,783,931; 6,900,297; 7,037,646; and 8,106,022, the entire contents of each of which are hereby incorporated herein by reference.

[0556] It is not necessary for all positions in a given compound to be uniformly modified, and in fact more than one of the aforementioned modifications can be incorporated in a single compound or even at a single nucleoside within an iRNA. The present invention also includes iRNA compounds that are chimeric compounds.

[0557] “Chimeric” iRNA compounds or “chimeras,” in the context of this invention, are iRNA compounds, such as dsRNA agents, that contain two or more chemically distinct regions, each made up of at least one monomer unit, i.e., a nucleotide in the case of a dsRNA compound. These iRNAs typically contain at least one region wherein the RNA is modified so as to confer upon the iRNA increased resistance to nuclease degradation, increased cellular uptake, or increased binding affinity for the target nucleic acid. An additional region of the iRNA can serve as a substrate for enzymes capable of cleaving RNA:DNA or RNA:RNA hybrids. By way of example, RNase H is a cellular endonuclease which cleaves the RNA strand of an RNA:DNA duplex. Activation of RNase H, therefore, results in cleavage of the RNA target, thereby greatly enhancing the efficiency of iRNA inhibition of gene expression. Consequently, comparable results can often be obtained with shorter iRNAs when chimeric dsRNAs are used, compared to phosphorothioate deoxy dsRNAs hybridizing to the same target region. Cleavage of the RNA target can be routinely detected by gel electrophoresis and, if necessary, associated nucleic acid hybridization techniques known in the art.

[0558] In certain instances, the RNA of an iRNA can be modified by a non-ligand group. A number of non-ligand molecules have been conjugated to iRNAs in order to enhance the activity, cellular distribution or cellular uptake of the iRNA, and procedures for performing such conjugations are available in the scientific literature. Such non-ligand moieties have included lipid moieties, such as cholesterol (Kubo, T. et al., Biochem. Biophys. Res. Comm., 2007, 365(1):54-61; Letsinger et al., Proc. Natl. Acad. Sci. USA, 1989, 86:6553), cholic acid (Manoharan et al., Bioorg. Med. Chem. Lett., 1994, 4:1053), a thioether, e.g., hexyl-S-tritylthiol (Manoharan et al., Ann. N.Y. Acad. Sci., 1992, 660:306; Manoharan et al., Bioorg. Med. Chem. Let., 1993, 3:2765), a thiocholesterol (Oberhauser et al., Nucl. Acids Res., 1992, 20:533), an aliphatic chain, e.g., dodecandiol or undecyl residues (Saison-Behmoaras et al., EMBO J., 1991, 10:111; Kabanov et al., FEBS Lett., 1990, 259:327; Svinarchuk et al., Biochimie, 1993, 75:49), a phospholipid, e.g., di-hexadecyl-rac-glycerol or triethylammonium 1,2-di-O-hexadecyl-rac-glycero-3-H-phosphonate (Manoharan et al., Tetrahedron Lett., 1995, 36:3651; Shea et al., Nucl. Acids Res., 1990, 18:3777), a polyamine or a polyethylene glycol chain (Manoharan et al., Nucleosides & Nucleotides, 1995, 14:969), or adamantane acetic acid (Manoharan et al., Tetrahedron Lett., 1995, 36:3651), a palmityl moiety (Mishra et al., Biochim. Biophys. Acta, 1995, 1264:229), or an octadecylamine or hexylamino-carbonyl-oxycholesterol moiety (Crooke et al., J. Pharmacol. Exp. Ther., 1996, 277:923). Representative United States patents that teach the preparation of such RNA conjugates have been listed above. Typical conjugation protocols involve the synthesis of RNAs bearing an aminolinker at one or more positions of the sequence. The amino group is then reacted with the molecule being conjugated using appropriate coupling or activating reagents. The conjugation reaction can be performed either with the RNA still bound to the solid support or following cleavage of the RNA, in solution phase. Purification of the RNA conjugate by HPLC typically affords the pure conjugate.

### V. Delivery of an RNAi Agent of the Disclosure

[0559] The delivery of a RNAi agent of the disclosure to a cell e.g., a cell within a subject, such as a human subject (e.g., a subject in need thereof, such as a subject having a DPP4-associated disorder, e.g., a metabolic disease, e.g., diabetes or a lipid metabolism disorder, e.g., a subject having or at risk of developing or at risk of having a metabolic disease, e.g., diabetes or a lipid metabolism disorder, can be achieved in a number of different ways. For example, delivery may be performed by contacting a cell with an RNAi agent of the disclosure either in vitro or in vivo. In vivo delivery may also be performed directly by administering a composition comprising an RNAi agent, e.g., a dsRNA, to a subject. Alternatively, in vivo delivery may be performed indirectly by administering one or more vectors that encode and direct the expression of the RNAi agent. These alternatives are discussed further below.

[0560] In general, any method of delivering a nucleic acid molecule (in vitro or in vivo) can be adapted for use with a RNAi agent of the disclosure (see e.g., Akhtar S. and Julian RL., (1992) Trends Cell. Biol. 2(5):139-144 and WO94/02595, which are incorporated herein by reference in their entireties). For in vivo delivery, factors to consider in order to deliver an RNAi agent include, for example, biological stability of the delivered agent, prevention of non-specific effects, and accumulation of the delivered agent in the target tissue. The non-specific effects of an RNAi agent can be minimized by local administration, for example, by direct injection or implantation into a tissue or topically administering the preparation. Local administration to a treatment site maximizes local concentration of the agent, limits the exposure of the agent to systemic tissues that can otherwise be harmed by the agent or that can degrade the agent, and permits a lower total dose of the RNAi agent to be administered. Several studies have shown successful knockdown of gene products when an RNAi agent is administered locally. For example, pulmonary delivery, e.g., inhalation, of a dsRNA, e.g., SOD1, has been shown to effectively knockdown gene and protein expression in lung tissue and that there is excellent uptake of the dsRNA by the bronchioles and alveoli of the lung. Intraocular delivery of a VEGF dsRNA by intravitreal injection in cynomolgus monkeys (Tolentino, M J. et al., (2004) Retina 24:132-138) and subretinal injections in mice (Reich, S J. et al. (2003) Mol. Vis. 9:210-216) were also both shown to prevent neovascularization in an experimental model of age-related macular degeneration. In addition, direct intratumoral injection of a dsRNA in mice reduces tumor volume (Pille, J. et al. (2005) Mol. Ther. 11:267-274) and can prolong survival of tumor-bearing mice (Kim, W J. et al., (2006) Mol. Ther. 14:343-350; Li, S. et al., (2007) Mol. Ther. 15:515-523). RNA interference has also shown success with local delivery to the CNS by direct injection (Dorn, G. et al., (2004) Nucleic Acids 32:e49; Tan, P H. et al. (2005) Gene Ther. 12:59-66; Makimura, H. et al. (2002) BMC Neurosci. 3:18; Shishkina, G T., et al. (2004) Neuroscience 129:521-528; Thakker, E R., et al. (2004) Proc. Natl. Acad. Sci. U.S.A. 101:17270-17275; Akaneya, Y., et al. (2005) J. Neurophysiol. 93:594-602) and to the lungs by intranasal administration (Howard, K A. et al., (2006) Mol. Ther. 14:476-484; Zhang, X. et al., (2004) J. Biol. Chem. 279:10677-10684; Bitko, V. et al., (2005) Nat. Med. 11:50-55). For administering a RNAi agent systemically for the treatment of a disease, the RNA can be modified or alternatively delivered using a drug delivery system; both methods act to prevent the rapid degradation of the dsRNA by endo- and exo-nucleases in vivo. Modification of the RNA or the pharmaceutical carrier can also permit targeting of the RNAi agent to the target tissue and avoid undesirable off-target effects (e.g., without wishing to be bound by theory, use of GNAs as described herein has been identified to destabilize the seed region of a dsRNA, resulting in enhanced preference of such dsRNAs for on-target effectiveness, relative to off-target effects, as such off-target effects are significantly weakened by such seed region destabilization). RNAi agents can be modified by chemical conjugation to lipophilic groups such as cholesterol to enhance cellular uptake and prevent degradation. For example, a RNAi agent directed against ApoB conjugated to a lipophilic cholesterol moiety was injected systemically into mice and resulted in knockdown of apoB mRNA in both the liver and jejunum (Soutschek, J. et al., (2004) Nature 432:173-178). Conjugation of an RNAi agent to an aptamer has been shown to inhibit tumor growth and mediate tumor regression in a mouse model of prostate cancer (McNamara, J O. et al., (2006) Nat. Biotechnol. 24:1005-1015). In an alternative embodiment, the RNAi agent can be delivered using drug delivery systems such as a nanoparticle, a dendrimer, a polymer, liposomes, or a cationic delivery system. Positively charged cationic delivery systems facilitate binding of molecule RNAi agent (negatively charged) and also enhance interactions at the negatively charged cell membrane to permit efficient uptake of an RNAi agent by the cell. Cationic lipids, dendrimers, or polymers can either be bound to an RNAi agent, or induced to form a vesicle or micelle (see e.g., Kim SH. et al., (2008) Journal of Controlled Release 129(2):107-116) that encases an RNAi agent. The formation of vesicles or micelles further prevents degradation of the RNAi agent when administered systemically. Methods for making and administering cationic-RNAi agent complexes are well within the abilities of one skilled in the art (see e.g., Sorensen, D R., et al. (2003) J. Mol. Biol 327:761-766; Verma, U N. et al., (2003) Clin. Cancer Res. 9:1291-1300; Arnold, A S et al. (2007) J. Hypertens. 25:197-205, which are incorporated herein by reference in their entirety). Some non-limiting examples of drug delivery systems useful for systemic delivery of RNAi agents include DOTAP (Sorensen, D R., et al (2003), supra; Verma, U N. et al., (2003), supra), Oligofectamine, “solid nucleic acid lipid particles” (Zimmermann, T S. et al., (2006) Nature 441:111-114), cardiolipin (Chien, P Y. et al., (2005) Cancer Gene Ther. 12:321-328; Pal, A. et al., (2005) Int J. Oncol. 26:1087-1091), polyethyleneimine (Bonnet ME. et al., (2008) Pharm. Res. August 16 Epub ahead of print; Aigner, A. (2006) J. Biomed. Biotechnol. 71659), Arg-Gly-Asp (RGD) peptides (Liu, S. (2006) Mol. Pharm. 3:472-487), and polyamidoamines (Tomalia, D A. et al., (2007) Biochem. Soc. Trans. 35:61-67; Yoo, H. et al., (1999) Pharm. Res. 16:1799-1804). In some embodiments, a RNAi agent forms a complex with cyclodextrin for systemic administration. Methods for administration and pharmaceutical compositions of RNAi agents and cyclodextrins can be found in U.S. Pat. No. 7,427,605, which is herein incorporated by reference in its entirety.

[0561] Certain aspects of the instant disclosure relate to a method of reducing the expression of a DPP4 gene in a cell, comprising contacting said cell with the double-stranded RNAi agent of the disclosure. In one embodiment, the cell is a hepatic cell, optionally a hepatocyte.

[0562] In certain embodiments, the RNAi agent is taken up on one or more tissue or cell types present in organs, e.g., liver, kidney.

[0563] Another aspect of the disclosure relates to a method of reducing the expression and/or activity of a DPP4 gene in a subject, comprising administering to the subject the double-stranded RNAi agent of the disclosure.

[0564] Another aspect of the disclosure relates to a method of treating a subject having a DPP4-associated disorder orat risk of having or at risk of developing a DPP4-associated disorder, comprising administering to the subject a therapeutically effective amount of the double-stranded RNAi agent of the disclosure, thereby treating the subject. In some embodiments, the DPP4-associated disorder comprises a metabolic disease, e.g., diabetes or a lipid metabolism disorders.

[0565] In one embodiment, the double-stranded RNAi agent is administered subcutaneously.

[0566] In one embodiment, the double-stranded RNAi agent is administered orally.

[0567] In one embodiment, the double-stranded RNAi agent is administered by intravenously.

[0568] In one embodiment, the double-stranded RNAi agent is administered by pulmonary sytem administration, e.g., intranasal administration, or oral inhalative administration.

[0569] For ease of exposition the formulations, compositions and methods in this section are discussed largely with regard to modified siRNA compounds. It may be understood, however, that these formulations, compositions and methods can be practiced with other siRNA compounds, e.g., unmodified siRNA compounds, and such practice is within the disclosure. A composition that includes a RNAi agent can be delivered to a subject by a variety of routes. Exemplary routes include pulmonary system, intravenous, subcutaneous, intraventricular, oral, topical, rectal, anal, vaginal, nasal, and ocular.

[0570] The RNAi agents of the disclosure can be incorporated into pharmaceutical compositions suitable for administration. Such compositions typically include one or more species of RNAi agent and a pharmaceutically acceptable carrier. As used herein the language “pharmaceutically acceptable carrier” is intended to include any and all solvents, dispersion media, coatings, antibacterial and antifungal agents, isotonic and absorption delaying agents, and the like, compatible with pharmaceutical administration. The use of such media and agents for pharmaceutically active substances is well known in the art. Except insofar as any conventional media or agent is incompatible with the active compound, use thereof in the compositions is contemplated. Supplementary active compounds can also be incorporated into the compositions.

[0571] The pharmaceutical compositions of the present disclosure may be administered in a number of ways depending upon whether local or systemic treatment is desired and upon the area to be treated. Administration may be intratracheal, intranasal, topical (including ophthalmic, vaginal, rectal, intranasal, transdermal), oral, parenteral, or pulmonary, e.g., by inhalation or insufflation of powders or aerosols, including by nebulizer. Parenteral administration includes intravenous drip, subcutaneous, intraperitoneal, or intramuscular injection, or intrathecal or intraventricular administration.

[0572] The route and site of administration may be chosen to enhance targeting. For example, to target muscle cells, intramuscular injection into the muscles of interest would be a logical choice.

[0573] Lung cells might be targeted by administering the RNAi agent in powder or aerosol form. The vascular endothelial cells could be targeted by coating a balloon catheter with the RNAi agent and mechanically introducing the RNA.

[0574] Compositions for pulmonary system delivery may include aqueous solutions, e.g., for intranasal or oral inhalative administration, suitable carriers composed of, e.g., lipids (liposomes, niosomes, microemulsions, lipidic micelles, solid lipid nanoparticles) or polymers (polymer micelles, dendrimers, polymeric nanoparticles, nonogels, nanocapsules), adjuvant, e.g., for oral inhalative administration. Aqueous compositions may be sterile and may optionally contain buffers, diluents, absorbtion enhancers and other suitable additives. Such administration permits both systemic and local delivery of the double stranded RNAi agents of the invention.

[0575] Intranasal administration may include instilling or insufflating a double stranded RNAi agent into the nasal cavity with syringes or droppers by applying a few drops at a time or via atomization. Suitable dosage forms for intranasal administration include drops, powders, nebulized mists, and sprays. Nasal delivery devices include, but not limited to, vapor inhaler, nasal dropper, spray bottle, metered dose spray pump, gas driven spray atomizer, nebulizer, mechanical powder sprayer, breath actuated inhaler, and insufflator. Devices for delivery deeper into the respiratory system, e.g., into the lung, include nebulizer, pressured metered-dose inhaler, dry powder inhaler, and thermal vaporization aerosol device. Devices for delivery by inhalation are available from commercial suppliers. Devices can be fixed or variable dose, single or multidose, disposable or reusable depending on, for example, the disease or disorder to be prevented or treated, the volume of the agent to be delivered, the frequency of delivery of the agent, and other considerations in the art.

[0576] Oral inhalative administration may include use of device, e.g., a passive breath driven or active power driven single/-multiple dose dry powder inhaler (DPI), to deliver a double stranded RNAi agent to the pulmonary system. Suitable dosage forms for oral inhalative administration include powders and solutions. Suitable devices for oral inhalative administration include nebulizers, metered-dose inhalers, and dry powder inhalers. Dry powder inhalers are of the most popular devices used to deliver drugs, especially proteins to the lungs. Exemplary commercially available dry powder inhalers include Spinhaler (Fisons Pharmaceuticals, Rochester, NY) and Rotahaler (GSK, RTP, NC). Several types of nebulizers are available, namely jet nebulizers, ultrasonic nebulizers, vibrating mesh nebulizers. Jet nebulizers are driven by compressed air. Ultrasonic nebulizers use a piezoelectric transducer in order to create droplets from an open liquid reservoir. Vibrating mesh nebulizers use perforated membranes actuated by an annular piezoelement to vibrate in resonant bending mode. The holes in the membrane have a large cross-section size on the liquid supply side and a narrow cross-section size on the side from where the droplets emerge. Depending on the therapeutic application, the hole sizes and number of holes can be adjusted. Selection of a suitable device depends on parameters, such as nature of the drug and its formulation, the site of action, and pathophysiology of the lung. Aqueous suspensions and solutions are nebulized effectively. Aerosols based on mechanically generated vibration mesh technologies also have been used successfully to deliver proteins to lungs.

[0577] The amount of RNAi agent for pulmonary system administration may vary from one target gene to another target gene and the appropriate amount that has to be applied may have to be determined individually for each target gene. Typically, this amount ranges from 10 μg to 2 mg, or 50 μg to 1500 μg, or 100 μg to 1000 μg.

[0578] Formulations for topical administration may include transdermal patches, ointments, lotions, creams, gels, drops, suppositories, sprays, liquids, and powders. Conventional pharmaceutical carriers, aqueous, powder or oily bases, thickeners and the like may be necessary or desirable. Coated condoms, gloves, and the like may also be useful.

[0579] Compositions for oral administration include powders or granules, suspensions or solutions in water, syrups, elixirs or non-aqueous media, tablets, capsules, lozenges, or troches. In the case of tablets, carriers that can be used include lactose, sodium citrate and salts of phosphoric acid. Various disintegrants such as starch, and lubricating agents such as magnesium stearate, sodium lauryl sulfate and talc, are commonly used in tablets. For oral administration in capsule form, useful diluents are lactose and high molecular weight polyethylene glycols. When aqueous suspensions are required for oral use, the nucleic acid compositions can be combined with emulsifying and suspending agents. If desired, certain sweetening or flavoring agents can be added. Compositions suitable for oral administration of the agents of the invention are further described in PCT Application No. PCT/US20/33156, the entire contents of which are incorporated herein by reference.

[0580] Compositions for intrathecal or intraventricular administration may include sterile aqueous solutions which may also contain buffers, diluents, and other suitable additives.

[0581] Formulations for parenteral administration may include sterile aqueous solutions which may also contain buffers, diluents, and other suitable additives. Intraventricular injection may be facilitated by an intraventricular catheter, for example, attached to a reservoir. For intravenous use, the total concentration of solutes may be controlled to render the preparation isotonic.

[0582] In one embodiment, the administration of the siRNA compound, e.g., a double-stranded siRNA compound, is parenteral, e.g., intravenous (e.g., as a bolus or as a diffusible infusion), intradermal, intraperitoneal, intramuscular, intrathecal, intraventricular, intracranial, subcutaneous, transmucosal, buccal, sublingual, endoscopic, rectal, oral, vaginal, topical, pulmonary system, intranasal, urethral, or ocular. Administration can be provided by the subject or by another person, e.g., a health care provider. The medication can be provided in measured doses or in a dispenser which delivers a metered dose. Selected modes of delivery are discussed in more detail below.

[0583] Vector Encoded RNAi Agents of the Disclosure

[0584] RNAi agents targeting the DPP4 gene can be expressed from transcription units inserted into DNA or RNA vectors (see, e.g., Couture, A, et al., TIG. (1996), 12:5-10; WO 00/22113, WO 00/22114, and U.S. Pat. No. 6,054,299). Expression can be sustained (months or longer), depending upon the specific construct used and the target tissue or cell type. These transgenes can be introduced as a linear construct, a circular plasmid, or a viral vector, which can be an integrating or non-integrating vector. The transgene can also be constructed to permit it to be inherited as an extrachromosomal plasmid (Gassmann, et al., (1995) Proc. Natl. Acad. Sci. USA 92:1292).

[0585] The individual strand or strands of a RNAi agent can be transcribed from a promoter on an expression vector. Where two separate strands are to be expressed to generate, for example, a dsRNA, two separate expression vectors can be co-introduced (e.g., by transfection or infection) into a target cell. Alternatively, each individual strand of a dsRNA can be transcribed by promoters both of which are located on the same expression plasmid. In one embodiment, a dsRNA is expressed as inverted repeat polynucleotides joined by a linker polynucleotide sequence such that the dsRNA has a stem and loop structure.

[0586] RNAi agent expression vectors are generally DNA plasmids or viral vectors. Expression vectors compatible with eukaryotic cells, such as those compatible with vertebrate cells, can be used to produce recombinant constructs for the expression of a RNAi agent as described herein. Delivery of RNAi agent expressing vectors can be systemic, such as by intravenous or intramuscular administration, by administration to target cells ex-planted from the patient followed by reintroduction into the patient, or by any other means that allows for introduction into a desired target cell.

[0587] Viral vector systems which can be utilized with the methods and compositions described herein include, but are not limited to, (a) adenovirus vectors; (b) retrovirus vectors, including but not limited to lentiviral vectors, moloney murine leukemia virus, etc.; (c) adeno-associated virus vectors; (d) herpes simplex virus vectors; (e) SV 40 vectors; (f) polyoma virus vectors; (g) papilloma virus vectors; (h) picornavirus vectors; (i) pox virus vectors such as an orthopox, e.g., vaccinia virus vectors or avipox, e.g. canary pox or fowl pox; and (j) a helper-dependent or gutless adenovirus. Replication-defective viruses can also be advantageous. Different vectors will or will not become incorporated into the cells' genome. The constructs can include viral sequences for transfection, if desired. Alternatively, the construct can be incorporated into vectors capable of episomal replication, e.g. EPV and EBV vectors. Constructs for the recombinant expression of a RNAi agent will generally require regulatory elements, e.g., promoters, enhancers, etc., to ensure the expression of the RNAi agent in target cells. Other aspects to consider for vectors and constructs are known in the art.

### VI. Pharmaceutical Compositions of the Invention

[0588] The present disclosure also includes pharmaceutical compositions and formulations which include the RNAi agents of the disclosure. In one embodiment, provided herein are pharmaceutical compositions containing an RNAi agent, as described herein, and a pharmaceutically acceptable carrier. The pharmaceutical compositions containing the RNAi agent are useful for treating a subject who would benefit from inhibiting or reducing the expression of a DPP4 gene, e.g., a subject having a DPP4-associated disorder, e.g., a subject having or at risk of having or at risk of developing a metabolic disease, e.g., diabetes or a lipid metabolism disorder. Such pharmaceutical compositions are formulated based on the mode of delivery. One example is compositions that are formulated for systemic administration via parenteral delivery, e.g., by intravenous (IV), intramuscular (IM), or for subcutaneous (subQ) delivery.

[0589] In some embodiments, the pharmaceutical compositions of the invention are pyrogen free or non-pyrogenic.

[0590] The pharmaceutical compositions of the disclosure may be administered in dosages sufficient to inhibit expression of a DPP4 gene. In general, a suitable dose of an RNAi agent of the disclosure will be a flat dose in the range of about 0.001 to about 200.0 mg about once per month to about once per year, typically about once per quarter (i.e., about once every three months) to about once per year, generally a flat dose in the range of about 1 to 50 mg about once per month to about once per year, typically about once per quarter to about once per year. In certain embodiments, the dose will be a fixed dose, e.g., a fixed dose of about 25 μg to about 5 mg.

[0591] A repeat-dose regimen may include administration of a therapeutic amount of a RNAi agent on a regular basis, such as monthly to once every six months. In certain embodiments, the RNAi agent is administered about once per quarter (i.e., about once every three months) to about twice per year, particularly for treatment of a chronic disease.

[0592] After an initial treatment regimen (e.g., loading dose), of once per day, twice per week, once per week, the treatments can be administered on a less frequent basis.

[0593] In other embodiments, a single dose of the pharmaceutical compositions can be long lasting, such that subsequent doses are administered at not more than 1, 2, 3, or 4 or more month intervals. In some embodiments of the disclosure, a single dose of the pharmaceutical compositions of the disclosure is administered once per month. In other embodiments of the disclosure, a single dose of the pharmaceutical compositions of the disclosure is administered once per quarter to twice per year.

[0594] The skilled artisan will appreciate that certain factors can influence the dosage and timing required to effectively treat a subject, including but not limited to the severity of the disease or disorder, previous treatments, the general health or age of the subject, and other diseases present. Moreover, treatment of a subject with a therapeutically effective amount of a composition can include a single treatment or a series of treatments.

[0595] Advances in mouse genetics have generated a number of mouse models for the study of various DPP4-associated diseases that would benefit from reduction in the expression of DPP4. Such models can be used for in vivo testing of RNAi agents, as well as for determining a therapeutically effective dose. Suitable mouse models are known in the art and include, for example, the mouse models described elsewhere herein.

[0596] The pharmaceutical compositions of the present disclosure can be administered in a number of ways depending upon whether local or systemic treatment is desired and upon the area to be treated. Administration can be topical (e.g., by a transdermal patch), pulmonary system administration by intranasal administration or oral inhalative administration, e.g., by inhalation or insufflation of powders or aerosols, including by nebulizer; intratracheal, epidermal and transdermal, oral or parenteral. Parenteral administration includes intravenous, intraarterial, subcutaneous, intraperitoneal or intramuscular injection or infusion; subdermal, e.g., via an implanted device; or intracranial, e.g., by intraparenchymal, intrathecal or intraventricular, administration.

[0597] The RNAi agents can be delivered in a manner to target a particular tissue, such as the liver.

[0598] Pharmaceutical compositions and formulations for topical administration can include transdermal patches, ointments, lotions, creams, gels, drops, suppositories, sprays, liquids and powders. Conventional pharmaceutical carriers, aqueous, powder or oily bases, thickeners and the like can be necessary or desirable. Coated condoms, gloves and the like can also be useful. Suitable topical formulations include those in which the RNAi agents featured in the disclosure are in admixture with a topical delivery agent such as lipids, liposomes, fatty acids, fatty acid esters, steroids, chelating agents and surfactants. Suitable lipids and liposomes include neutral (e.g., dioleoylphosphatidyl DOPE ethanolamine, dimyristoylphosphatidyl choline DMPC, distearolyphosphatidyl choline) negative (e.g., dimyristoylphosphatidyl glycerol DMPG) and cationic (e.g., dioleoyltetramethylaminopropyl DOTAP and dioleoylphosphatidyl ethanolamine DOTMA). RNAi agents featured in the disclosure can be encapsulated within liposomes or can form complexes thereto, in particular to cationic liposomes. Alternatively, RNAi agents can be complexed to lipids, in particular to cationic lipids. Suitable fatty acids and esters include but are not limited to arachidonic acid, oleic acid, eicosanoic acid, lauric acid, caprylic acid, capric acid, myristic acid, palmitic acid, stearic acid, linoleic acid, linolenic acid, dicaprate, tricaprate, monoolein, dilaurin, glyceryl 1-monocaprate, 1-dodecylazacycloheptan-2-one, an acylcarnitine, an acylcholine, or a C₁₋₂₀ alkyl ester (e.g., isopropylmyristate IPM), monoglyceride, diglyceride or pharmaceutically acceptable salt thereof. Topical formulations are described in detail in U.S. Pat. No. 6,747,014, which is incorporated herein by reference.

[0599] A. RNAi Agent Formulations Comprising Membranous Molecular Assemblies

[0600] A RNAi agent for use in the compositions and methods of the disclosure can be formulated for delivery in a membranous molecular assembly, e.g., a liposome or a micelle. As used herein, the term “liposome” refers to a vesicle composed of amphiphilic lipids arranged in at least one bilayer, e.g., one bilayer or a plurality of bilayers. Liposomes include unilamellar and multilamellar vesicles that have a membrane formed from a lipophilic material and an aqueous interior. The aqueous portion contains the RNAi agent composition. The lipophilic material isolates the aqueous interior from an aqueous exterior, which typically does not include the RNAi agent composition, although in some examples, it may. Liposomes are useful for the transfer and delivery of active ingredients to the site of action. Because the liposomal membrane is structurally similar to biological membranes, when liposomes are applied to a tissue, the liposomal bilayer fuses with bilayer of the cellular membranes. As the merging of the liposome and cell progresses, the internal aqueous contents that include the RNAi agent are delivered into the cell where the RNAi agent can specifically bind to a target RNA and can mediate RNAi. In some cases the liposomes are also specifically targeted, e.g., to direct the RNAi agent to particular cell types.

[0601] A liposome containing an RNAi agent can be prepared by a variety of methods. In one example, the lipid component of a liposome is dissolved in a detergent so that micelles are formed with the lipid component. For example, the lipid component can be an amphipathic cationic lipid or lipid conjugate. The detergent can have a high critical micelle concentration and may be nonionic. Exemplary detergents include cholate, CHAPS, octylglucoside, deoxycholate, and lauroyl sarcosine. The RNAi agent preparation is then added to the micelles that include the lipid component. The cationic groups on the lipid interact with the RNAi agent and condense around the RNAi agent to form a liposome. After condensation, the detergent is removed, e.g., by dialysis, to yield a liposomal preparation of RNAi agent.

[0602] If necessary a carrier compound that assists in condensation can be added during the condensation reaction, e.g., by controlled addition. For example, the carrier compound can be a polymer other than a nucleic acid (e.g., spermine or spermidine). pH can also adjusted to favor condensation.

[0603] Methods for producing stable polynucleotide delivery vehicles, which incorporate a polynucleotide/cationic lipid complex as structural components of the delivery vehicle, are further described in, e.g., WO 96/37194, the entire contents of which are incorporated herein by reference. Liposome formation can also include one or more aspects of exemplary methods described in Felgner, P. L. et al., (1987) Proc. Natl. Acad. Sci. USA 8:7413-7417; U.S. Pat. Nos. 4,897,355; 5,171,678; Bangham et al., (1965) M. Mol. Biol. 23:238; Olson et al., (1979) Biochim. Biophys. Acta 557:9; Szoka et al., (1978) Proc. Natl. Acad. Sci. 75: 4194; Mayhew et al., (1984) Biochim. Biophys. Acta 775:169; Kim et al., (1983) Biochim. Biophys. Acta 728:339; and Fukunaga et al., (1984) Endocrinol. 115:757. Commonly used techniques for preparing lipid aggregates of appropriate size for use as delivery vehicles include sonication and freeze-thaw plus extrusion (see, e.g., Mayer et al., (1986) Biochim. Biophys. Acta 858:161. Microfluidization can be used when consistently small (50 to 200 nm) and relatively uniform aggregates are desired (Mayhew et al., (1984) Biochim. Biophys. Acta 775:169. These methods are readily adapted to packaging RNAi agent preparations into liposomes.

[0604] Liposomes fall into two broad classes. Cationic liposomes are positively charged liposomes which interact with the negatively charged nucleic acid molecules to form a stable complex. The positively charged nucleic acid/liposome complex binds to the negatively charged cell surface and is internalized in an endosome. Due to the acidic pH within the endosome, the liposomes are ruptured, releasing their contents into the cell cytoplasm (Wang et al. (1987) Biochem. Biophys. Res. Commun., 147:980-985).

[0605] Liposomes, which are pH-sensitive or negatively charged, entrap nucleic acids rather than complex with them. Since both the nucleic acid and the lipid are similarly charged, repulsion rather than complex formation occurs. Nevertheless, some nucleic acid is entrapped within the aqueous interior of these liposomes. pH sensitive liposomes have been used to deliver nucleic acids encoding the thymidine kinase gene to cell monolayers in culture. Expression of the exogenous gene was detected in the target cells (Zhou et al. (1992) Journal of Controlled Release, 19:269-274).

[0606] One major type of liposomal composition includes phospholipids other than naturally-derived phosphatidylcholine. Neutral liposome compositions, for example, can be formed from dimyristoyl phosphatidylcholine (DMPC) or dipalmitoyl phosphatidylcholine (DPPC). Anionic liposome compositions generally are formed from dimyristoyl phosphatidylglycerol, while anionic fusogenic liposomes are formed primarily from dioleoyl phosphatidylethanolamine (DOPE). Another type of liposomal composition is formed from phosphatidylcholine (PC) such as, for example, soybean PC, and egg PC. Another type is formed from mixtures of phospholipid or phosphatidylcholine or cholesterol.

[0607] Examples of other methods to introduce liposomes into cells in vitro and in vivo include U.S. Pat. Nos. 5,283,185; 5,171,678; WO 94/00569; WO 93/24640; WO 91/16024; Felgner, (1994) J. Biol. Chem. 269:2550; Nabel, (1993) Proc. Natl. Acad. Sci. 90:11307; Nabel, (1992) Human Gene Ther. 3:649; Gershon, (1993) Biochem. 32:7143; and Strauss, (1992) EMBO J. 11:417.

[0608] Non-ionic liposomal systems have also been examined to determine their utility in the delivery of drugs to the skin, in particular systems comprising non-ionic surfactant and cholesterol. Non-ionic liposomal formulations comprising Novasome™ I (glyceryl dilaurate/cholesterol/polyoxyethylene-10-stearyl ether) and Novasome™ II (glyceryl distearate/cholesterol/polyoxyethylene-10-stearyl ether) were used to deliver cyclosporin-A into the dermis of mouse skin. Results indicated that such non-ionic liposomal systems were effective in facilitating the deposition of cyclosporine A into different layers of the skin (Hu et al., (1994) S.T.P.Pharma. Sci., 4(6):466).

[0609] Liposomes also include “sterically stabilized” liposomes, a term which, as used herein, refers to liposomes comprising one or more specialized lipids that, when incorporated into liposomes, result in enhanced circulation lifetimes relative to liposomes lacking such specialized lipids. Examples of sterically stabilized liposomes are those in which part of the vesicle-forming lipid portion of the liposome (A) comprises one or more glycolipids, such as monosialoganglioside G_{M1}, or (B) is derivatized with one or more hydrophilic polymers, such as a polyethylene glycol (PEG) moiety. While not wishing to be bound by any particular theory, it is thought in the art that, at least for sterically stabilized liposomes containing gangliosides, sphingomyelin, or PEG-derivatized lipids, the enhanced circulation half-life of these sterically stabilized liposomes derives from a reduced uptake into cells of the reticuloendothelial system (RES) (Allen et al., (1987) FEBS Letters, 223:42; Wu et al., (1993) Cancer Research, 53:3765).

[0610] Various liposomes comprising one or more glycolipids are known in the art. Papahadjopoulos et al. (Ann. N.Y. Acad. Sci., (1987), 507:64) reported the ability of monosialoganglioside G_{M1}, galactocerebroside sulfate and phosphatidylinositol to improve blood half-lives of liposomes. These findings were expounded upon by Gabizon et al. (Proc. Natl. Acad. Sci. U.S.A., (1988), 85:6949). U.S. Pat. No. 4,837,028 and WO 88/04924, both to Allen et al., disclose liposomes comprising (1) sphingomyelin and (2) the ganglioside G_{M}i or a galactocerebroside sulfate ester. U.S. Pat. No. 5,543,152 (Webb et al.) discloses liposomes comprising sphingomyelin. Liposomes comprising 1,2-sn-dimyristoylphosphatidylcholine are disclosed in WO 97/13499 (Lim et al).

[0611] In one embodiment, cationic liposomes are used. Cationic liposomes possess the advantage of being able to fuse to the cell membrane. Non-cationic liposomes, although not able to fuse as efficiently with the plasma membrane, are taken up by macrophages in vivo and can be used to deliver RNAi agents to macrophages.

[0612] Further advantages of liposomes include: liposomes obtained from natural phospholipids are biocompatible and biodegradable; liposomes can incorporate a wide range of water and lipid soluble drugs; liposomes can protect encapsulated RNAi agents in their internal compartments from metabolism and degradation (Rosoff, in “Pharmaceutical Dosage Forms,” Lieberman, Rieger and Banker (Eds.), 1988, volume 1, p. 245). Important considerations in the preparation of liposome formulations are the lipid surface charge, vesicle size and the aqueous volume of the liposomes.

[0613] A positively charged synthetic cationic lipid, N-[1-(2,3-dioleyloxy)propyl]-N,N,N-trimethylammonium chloride (DOTMA) can be used to form small liposomes that interact spontaneously with nucleic acid to form lipid-nucleic acid complexes which are capable of fusing with the negatively charged lipids of the cell membranes of tissue culture cells, resulting in delivery of RNAi agent (see, e.g., Felgner, P. L. et al., (1987) Proc. Natd. Acad. Sci. USA 8:7413-7417, and U.S. Pat. No. 4,897,355 for a description of DOTMA and its use with DNA).

[0614] A DOTMA analogue, 1,2-bis(oleoyloxy)-3-(trimethylammonia)propane (DOTAP) can be used in combination with a phospholipid to form DNA-complexing vesicles. Lipofectin™ Bethesda Research Laboratories, Gaithersburg, Md.) is an effective agent for the delivery of highly anionic nucleic acids into living tissue culture cells that comprise positively charged DOTMA liposomes which interact spontaneously with negatively charged polynucleotides to form complexes. When enough positively charged liposomes are used, the net charge on the resulting complexes is also positive. Positively charged complexes prepared in this way spontaneously attach to negatively charged cell surfaces, fuse with the plasma membrane, and efficiently deliver functional nucleic acids into, for example, tissue culture cells. Another commercially available cationic lipid, 1,2-bis(oleoyloxy)-3,3-(trimethylammonia)propane (“DOTAP”) (Boehringer Mannheim, Indianapolis, Indiana) differs from DOTMA in that the oleoyl moieties are linked by ester, rather than ether linkages.

[0615] Other reported cationic lipid compounds include those that have been conjugated to a variety of moieties including, for example, carboxyspermine which has been conjugated to one of two types of lipids and includes compounds such as 5-carboxyspermylglycine dioctaoleoylamide (“DOGS”) (Transfectam™, Promega, Madison, Wisconsin) and dipalmitoylphosphatidylethanolamine 5-carboxyspermyl-amide (“DPPES”) (see, e.g., U.S. Pat. No. 5,171,678).

[0616] Another cationic lipid conjugate includes derivatization of the lipid with cholesterol (“DC-Chol”) which has been formulated into liposomes in combination with DOPE (See, Gao, X. and Huang, L., (1991) Biochim. Biophys. Res. Commun. 179:280). Lipopolylysine, made by conjugating polylysine to DOPE, has been reported to be effective for transfection in the presence of serum (Zhou, X. et al., (1991) Biochim. Biophys. Acta 1065:8). For certain cell lines, these liposomes containing conjugated cationic lipids, are said to exhibit lower toxicity and provide more efficient transfection than the DOTMA-containing compositions. Other commercially available cationic lipid products include DMRIE and DMRIE-HP (Vical, La Jolla, California) and Lipofectamine (DOSPA) (Life Technology, Inc., Gaithersburg, Maryland). Other cationic lipids suitable for the delivery of oligonucleotides are described in WO 98/39359 and WO 96/37194.

[0617] Liposomal formulations are particularly suited for topical administration, liposomes present several advantages over other formulations. Such advantages include reduced side effects related to high systemic absorption of the administered drug, increased accumulation of the administered drug at the desired target, and the ability to administer RNAi agent into the skin. In some implementations, liposomes are used for delivering RNAi agent to epidermal cells and also to enhance the penetration of RNAi agent into dermal tissues, e.g., into skin. For example, the liposomes can be applied topically. Topical delivery of drugs formulated as liposomes to the skin has been documented (see, e.g., Weiner et al., (1992) Journal of Drug Targeting, vol. 2,405-410 and du Plessis et al., (1992) Antiviral Research, 18:259-265; Mannino, R. J. and Fould-Fogerite, S., (1998) Biotechniques 6:682-690; Itani, T. et al., (1987) Gene 56:267-276; Nicolau, C. et al. (1987) Meth. Enzymol. 149:157-176; Straubinger, R. M. and Papahadjopoulos, D. (1983) Meth. Enzymol. 101:512-527; Wang, C. Y. and Huang, L., (1987) Proc. Natl. Acad. Sci. USA 84:7851-7855).

[0618] Non-ionic liposomal systems have also been examined to determine their utility in the delivery of drugs to the skin, in particular systems comprising non-ionic surfactant and cholesterol. Non-ionic liposomal formulations comprising Novasome I (glyceryl dilaurate/cholesterol/polyoxyethylene-10-stearyl ether) and Novasome II (glyceryl distearate/cholesterol/polyoxyethylene-10-stearyl ether) were used to deliver a drug into the dermis of mouse skin. Such formulations with RNAi agent are useful for treating a dermatological disorder.

[0619] Liposomes that include RNAi agents can be made highly deformable. Such deformability can enable the liposomes to penetrate through pore that are smaller than the average radius of the liposome. For example, transfersomes are a type of deformable liposomes. Transferosomes can be made by adding surface edge activators, usually surfactants, to a standard liposomal composition. Transfersomes that include RNAi agent can be delivered, for example, subcutaneously by infection in order to deliver RNAi agent to keratinocytes in the skin. In order to cross intact mammalian skin, lipid vesicles must pass through a series of fine pores, each with a diameter less than 50 nm, under the influence of a suitable transdermal gradient. In addition, due to the lipid properties, these transferosomes can be self-optimizing (adaptive to the shape of pores, e.g., in the skin), self-repairing, and can frequently reach their targets without fragmenting, and often self-loading.

[0620] Other formulations amenable to the present disclosure are described in U.S. provisional application Ser. No. 61/018,616, filed Jan. 2, 2008; 61/018,611, filed Jan. 2, 2008; 61/039,748, filed Mar. 26, 2008; 61/047,087, filed Apr. 22, 2008 and 61/051,528, filed May 8, 2008. PCT application number PCT/US2007/080331, filed Oct. 3, 2007, also describes formulations that are amenable to the present disclosure.

[0621] Transfersomes, yet another type of liposomes, are highly deformable lipid aggregates which are attractive candidates for drug delivery vehicles. Transfersomes can be described as lipid droplets which are so highly deformable that they are easily able to penetrate through pores which are smaller than the droplet. Transfersomes are adaptable to the environment in which they are used, e.g., they are self-optimizing (adaptive to the shape of pores in the skin), self-repairing, frequently reach their targets without fragmenting, and often self-loading. To make transfersomes it is possible to add surface edge-activators, usually surfactants, to a standard liposomal composition. Transfersomes have been used to deliver serum albumin to the skin. The transfersome-mediated delivery of serum albumin has been shown to be as effective as subcutaneous injection of a solution containing serum albumin.

[0622] Surfactants find wide application in formulations such as those described herein, particularly in emulsions (including microemulsions) and liposomes. The most common way of classifying and ranking the properties of the many different types of surfactants, both natural and synthetic, is by the use of the hydrophile/lipophile balance (HLB). The nature of the hydrophilic group (also known as the “head”) provides the most useful means for categorizing the different surfactants used in formulations (Rieger, in Pharmaceutical Dosage Forms, Marcel Dekker, Inc., New York, N.Y., 1988, p. 285).

[0623] If the surfactant molecule is not ionized, it is classified as a nonionic surfactant. Nonionic surfactants find wide application in pharmaceutical and cosmetic products and are usable over a wide range of pH values. In general, their HLB values range from 2 to about 18 depending on their structure. Nonionic surfactants include nonionic esters such as ethylene glycol esters, propylene glycol esters, glyceryl esters, polyglyceryl esters, sorbitan esters, sucrose esters, and ethoxylated esters. Nonionic alkanolamides and ethers such as fatty alcohol ethoxylates, propoxylated alcohols, and ethoxylated/propoxylated block polymers are also included in this class. The polyoxyethylene surfactants are the most popular members of the nonionic surfactant class.

[0624] If the surfactant molecule carries a negative charge when it is dissolved or dispersed in water, the surfactant is classified as anionic. Anionic surfactants include carboxylates such as soaps, acyl lactylates, acyl amides of amino acids, esters of sulfuric acid such as alkyl sulfates and ethoxylated alkyl sulfates, sulfonates such as alkyl benzene sulfonates, acyl isethionates, acyl taurates and sulfosuccinates, and phosphates. The most important members of the anionic surfactant class are the alkyl sulfates and the soaps.

[0625] If the surfactant molecule carries a positive charge when it is dissolved or dispersed in water, the surfactant is classified as cationic. Cationic surfactants include quaternary ammonium salts and ethoxylated amines. The quaternary ammonium salts are the most used members of this class.

[0626] If the surfactant molecule has the ability to carry either a positive or negative charge, the surfactant is classified as amphoteric. Amphoteric surfactants include acrylic acid derivatives, substituted alkylamides, N-alkylbetaines and phosphatides.

[0627] The use of surfactants in drug products, formulations and in emulsions has been reviewed (Rieger, in Pharmaceutical Dosage Forms, Marcel Dekker, Inc., New York, N.Y., 1988, p. 285).

[0628] The RNAi agent for use in the methods of the disclosure can also be provided as micellar formulations. “Micelles” are defined herein as a particular type of molecular assembly in which amphipathic molecules are arranged in a spherical structure such that all the hydrophobic portions of the molecules are directed inward, leaving the hydrophilic portions in contact with the surrounding aqueous phase. The converse arrangement exists if the environment is hydrophobic.

[0629] A mixed micellar formulation suitable for delivery through transdermal membranes may be prepared by mixing an aqueous solution of the siRNA composition, an alkali metal C₈ to C₂₂ alkyl sulphate, and a micelle forming compounds. Exemplary micelle forming compounds include lecithin, hyaluronic acid, pharmaceutically acceptable salts of hyaluronic acid, glycolic acid, lactic acid, chamomile extract, cucumber extract, oleic acid, linoleic acid, linolenic acid, monoolein, monooleates, monolaurates, borage oil, evening of primrose oil, menthol, trihydroxy oxo cholanyl glycine and pharmaceutically acceptable salts thereof, glycerin, polyglycerin, lysine, polylysine, triolein, polyoxyethylene ethers and analogues thereof, polidocanol alkyl ethers and analogues thereof, chenodeoxycholate, deoxycholate, and mixtures thereof. The micelle forming compounds may be added at the same time or after addition of the alkali metal alkyl sulphate. Mixed micelles will form with substantially any kind of mixing of the ingredients but vigorous mixing in order to provide smaller size micelles.

[0630] In one method a first micellar composition is prepared which contains the siRNA composition and at least the alkali metal alkyl sulphate. The first micellar composition is then mixed with at least three micelle forming compounds to form a mixed micellar composition. In another method, the micellar composition is prepared by mixing the siRNA composition, the alkali metal alkyl sulphate and at least one of the micelle forming compounds, followed by addition of the remaining micelle forming compounds, with vigorous mixing.

[0631] Phenol or m-cresol may be added to the mixed micellar composition to stabilize the formulation and protect against bacterial growth. Alternatively, phenol or m-cresol may be added with the micelle forming ingredients. An isotonic agent such as glycerin may also be added after formation of the mixed micellar composition.

[0632] For delivery of the micellar formulation as a spray, the formulation can be put into an aerosol dispenser and the dispenser is charged with a propellant. The propellant, which is under pressure, is in liquid form in the dispenser. The ratios of the ingredients are adjusted so that the aqueous and propellant phases become one, i.e., there is one phase. If there are two phases, it is necessary to shake the dispenser prior to dispensing a portion of the contents, e.g., through a metered valve. The dispensed dose of pharmaceutical agent is propelled from the metered valve in a fine spray.

[0633] Propellants may include hydrogen-containing chlorofluorocarbons, hydrogen-containing fluorocarbons, dimethyl ether and diethyl ether. In certain embodiments, HFA 134a (1,1,1,2 tetrafluoroethane) may be used.

[0634] The specific concentrations of the essential ingredients can be determined by relatively straightforward experimentation. For absorption through the oral cavities, it is often desirable to increase, e.g., at least double or triple, the dosage for through injection or administration through the gastrointestinal tract.

[0635] Lipid Particles

[0636] RNAi agents, e.g., dsRNAs of in the disclosure may be fully encapsulated in a lipid formulation, e.g., a LNP, or other nucleic acid-lipid particle.

[0637] As used herein, the term “LNP” refers to a stable nucleic acid-lipid particle. LNPs typically contain a cationic lipid, a non-cationic lipid, and a lipid that prevents aggregation of the particle (e.g., a PEG-lipid conjugate). LNPs are extremely useful for systemic applications, as they exhibit extended circulation lifetimes following intravenous (i.v.) injection and accumulate at distal sites (e.g., sites physically separated from the administration site). LNPs include “pSPLP,” which include an encapsulated condensing agent-nucleic acid complex as set forth in WO 00/03683. The particles of the present disclosure typically have a mean diameter of about 50 nm to about 150 nm, more typically about 60 nm to about 130 nm, more typically about 70 nm to about 110 nm, most typically about 70 nm to about 90 nm, and are substantially nontoxic. In addition, the nucleic acids when present in the nucleic acid-lipid particles of the present disclosure are resistant in aqueous solution to degradation with a nuclease. Nucleic acid-lipid particles and their method of preparation are disclosed in, e.g., U.S. Pat. Nos. 5,976,567; 5,981,501; 6,534,484; 6,586,410; 6,815,432; United States Patent publication No. 2010/0324120 and WO 96/40964.

[0638] In one embodiment, the lipid to drug ratio (mass/mass ratio) (e.g., lipid to dsRNA ratio) will be in the range of from about 1:1 to about 50:1, from about 1:1 to about 25:1, from about 3:1 to about 15:1, from about 4:1 to about 10:1, from about 5:1 to about 9:1, or about 6:1 to about 9:1. Ranges intermediate to the above recited ranges are also contemplated to be part of the disclosure.

[0639] Certain specific LNP formulations for delivery of RNAi agents have been described in the art, including, e.g., “LNP01” formulations as described in, e.g., WO 2008/042973, which is hereby incorporated by reference.

[0640] Additional exemplary lipid-dSRNA formulations are identified in the table below.

| | | cationic lipid/non-cationic |
|---|---|---|
| | | lipid/cholesterol/PEG-lipid conjugate |
| | Ionizable/Cationic Lipid | Lipid:siRNA ratio |
| SNALP-1 | 1,2-Dilinolenyloxy-N,N- | DLinDMA/DPPC/Cholesterol/PEG- |
| | dimethylaminopropane (DLinDMA) | cDMA |
| | | (57.1/7.1/34.4/1.4) |
| | | lipid:siRNA ~7:1 |
| 2-XTC | 2,2-Dilinoleyl-4-dimethylaminoethyl-[1,3]- | XTC/DPPC/Cholesterol/PEG-cDMA |
| | dioxolane (XTC) | 57.1/7.1/34.4/1.4 |
| | | lipid:siRNA ~7:1 |
| LNP05 | 2,2-Dilinoleyl-4-dimethylaminoethyl-[1,3]- | XTC/DSPC/Cholesterol/PEG-DMG |
| | dioxolane (XTC) | 57.5/7.5/31.5/3.5 |
| | | lipid:siRNA ~6:1 |
| LNP06 | 2,2-Dilinoleyl-4-dimethylaminoethyl-[1,3]- | XTC/DSPC/Cholesterol/PEG-DMG |
| | dioxolane (XTC) | 57.5/7.5/31.5/3.5 |
| | | lipid:siRNA ~11:1 |
| LNP07 | 2,2-Dilinoleyl-4-dimethylaminoethyl-[1,3]- | XTC/DSPC/Cholesterol/PEG-DMG |
| | dioxolane (XTC) | 60/7.5/31/1.5, |
| | | lipid:siRNA ~6:1 |
| LNP08 | 2,2-Dilinoleyl-4-dimethylaminoethyl-[1,3]- | XTC/DSPC/Cholesterol/PEG-DMG |
| | dioxolane (XTC) | 60/7.5/31/1.5, |
| | | lipid:siRNA ~11:1 |
| LNP09 | 2,2-Dilinoleyl-4-dimethylaminoethyl-[1,3]- | XTC/DSPC/Cholesterol/PEG-DMG |
| | dioxolane (XTC) | 50/10/38.5/1.5 |
| | | Lipid:siRNA10:1 |
| LNP10 | (3aR,5s,6aS)-N,N-dimethyl-2,2- | ALN100/DSPC/Cholesterol/PEG- |
| | di((9Z,12Z)-octadeca-9,12- | DMG |
| | dienyl)tetrahydro-3aH- | 50/10/38.5/1.5 |
| | cyclopenta[d][1,3]dioxol-5-amine | Lipid:siRNA10:1 |
| | (ALN100) | |
| LNP11 | (6Z,9Z,28Z,31Z)-heptatriaconta-6,9,28,31- | MC-3/DSPC/Cholesterol/PEG-DMG |
| | tetraen-19-yl 4-(dimethylamino)butanoate | 50/10/38.5/1.5 |
| | (MC3) | Lipid:siRNA10:1 |
| LNP12 | 1,1'-(2-(4-(2-((2-(bis(2- | Tech G1/DSPC/Cholesterol/PEG- |
| | hydroxydodecyl)amino)ethyl)(2- | DMG |
| | hydroxydodecyl)amino)ethyl)piperazin-1- | 50/10/38.5/1.5 |
| | yl)ethylazanediyl)didodecan-2-ol (Tech | Lipid:siRNA10:1 |
| | G1) | |
| LNP13 | XTC | XTC/DSPC/Chol/PEG-DMG |
| | | 50/10/38.5/1.5 |
| | | Lipid:siRNA:33:1 |
| LNP14 | MC3 | MC3/DSPC/Chol/PEG-DMG |
| | | 40/15/40/5 |
| | | Lipid:siRNA:11:1 |
| LNP15 | MC3 | MC3/DSPC/Chol/PEG-DSG/GalNAc- |
| | | PEG-DSG |
| | | 50/10/35/4.5/0.5 |
| | | Lipid:siRNA:11:1 |
| LNP16 | MC3 | MC3/DSPC/Chol/PEG-DMG |
| | | 50/10/38.5/1.5 |
| | | Lipid:siRNA:7:1 |
| LNP17 | MC3 | MC3/DSPC/Chol/PEG-DSG |
| | | 50/10/38.5/1.5 |
| | | Lipid:siRNA:10:1 |
| LNP18 | MC3 | MC3/DSPC/Chol/PEG-DMG |
| | | 50/10/38.5/1.5 |
| | | Lipid:siRNA: 12:1 |
| LNP19 | MC3 | MC3/DSPC/Chol/PEG-DMG |
| | | 50/10/35/5 |
| | | Lipid:siRNA:8:1 |
| LNP20 | MC3 | MC3/DSPC/Chol/PEG-DPG |
| | | 50/10/38.5/1.5 |
| | | Lipid:siRNA:10:1 |
| LNP21 | C12-200 | C12-200/DSPC/Chol/PEG-DSG |
| | | 50/10/38.5/1.5 |
| | | Lipid:siRNA:7:1 |
| LNP22 | XTC | XTC/DSPC/Chol/PEG-DSG |
| | | 50/10/38.5/1.5 |
| | | Lipid:siRNA:10:1 |

[0641] DSPC: distearoylphosphatidylcholine
[0642] DPPC: dipalmitoylphosphatidylcholine
[0643] PEG-DMG: PEG-didimyristoyl glycerol (C14-PEG, or PEG-C14) (PEG with avg mol wt of 2000)
[0644] PEG-DSG: PEG-distyryl glycerol (C18-PEG, or PEG-C18) (PEG with avg mol wt of 2000)
[0645] PEG-cDMA: PEG-carbamoyl-1,2-dimyristyloxypropylamine (PEG with avg mol wt of 2000)
[0646] SNALP (1,2-Dilinolenyloxy-N,N-dimethylaminopropane (DLinDMA)) comprising formulations are described in WO 2009/127060, which is hereby incorporated by reference.
[0647] XTC comprising formulations are described in WO 2010/088537, the entire contents of which are hereby incorporated herein by reference.
[0648] MC3 comprising formulations are described, e.g., in United States Patent Publication No. 2010/0324120, the entire contents of which are hereby incorporated by reference.
[0649] ALNY-100 comprising formulations are described in WO 2010/054406, the entire contents of which are hereby incorporated herein by reference.
[0650] C12-200 comprising formulations are described in WO 2010/129709, the entire contents of which are hereby incorporated herein by reference.

[0651] Compositions and formulations for oral administration include powders or granules, microparticulates, nanoparticulates, suspensions or solutions in water or non-aqueous media, capsules, gel capsules, sachets, tablets or minitablets. Thickeners, flavoring agents, diluents, emulsifiers, dispersing aids or binders can be desirable. In some embodiments, oral formulations are those in which dsRNAs featured in the disclosure are administered in conjunction with one or more penetration enhancer surfactants and chelators. Suitable surfactants include fatty acids or esters or salts thereof, bile acids or salts thereof. Suitable bile acids/salts include chenodeoxycholic acid (CDCA) and ursodeoxychenodeoxycholic acid (UDCA), cholic acid, dehydrocholic acid, deoxycholic acid, glucholic acid, glycholic acid, glycodeoxycholic acid, taurocholic acid, taurodeoxycholic acid, sodium tauro-24,25-dihydro-fusidate and sodium glycodihydrofusidate. Suitable fatty acids include arachidonic acid, undecanoic acid, oleic acid, lauric acid, caprylic acid, capric acid, myristic acid, palmitic acid, stearic acid, linoleic acid, linolenic acid, dicaprate, tricaprate, monoolein, dilaurin, glyceryl 1-monocaprate, 1-dodecylazacycloheptan-2-one, an acylcarnitine, an acylcholine, or a monoglyceride, a diglyceride or a pharmaceutically acceptable salt thereof (e.g., sodium). In some embodiments, combinations of penetration enhancers are used, for example, fatty acids/salts in combination with bile acids/salts. One exemplary combination is the sodium salt of lauric acid, capric acid and UDCA. Further penetration enhancers include polyoxyethylene-9-lauryl ether, polyoxyethylene-20-cetyl ether. DsRNAs featured in the disclosure can be delivered orally, in granular form including sprayed dried particles, or complexed to form micro or nanoparticles. DsRNA complexing agents include poly-amino acids; polyimines; polyacrylates; polyalkylacrylates, polyoxethanes, polyalkylcyanoacrylates; cationized gelatins, albumins, starches, acrylates, polyethyleneglycols (PEG) and starches; polyalkylcyanoacrylates; DEAE-derivatized polyimines, pollulans, celluloses and starches. Suitable complexing agents include chitosan, N-trimethylchitosan, poly-L-lysine, polyhistidine, polyornithine, polyspermines, protamine, polyvinylpyridine, polythiodiethylaminomethylethylene P(TDAE), polyaminostyrene (e.g., p-amino), poly(methylcyanoacrylate), poly(ethylcyanoacrylate), poly(butylcyanoacrylate), poly(isobutylcyanoacrylate), poly(isohexylcynaoacrylate), DEAE-methacrylate, DEAE-hexylacrylate, DEAE-acrylamide, DEAE-albumin and DEAE-dextran, polymethylacrylate, polyhexylacrylate, poly(D,L-lactic acid), poly(DL-lactic-co-glycolic acid (PLGA), alginate, and polyethyleneglycol (PEG). Oral formulations for dsRNAs and their preparation are described in detail in U.S. Pat. No. 6,887,906, U.S. 2003/0027780, and U.S. Pat. No. 6,747,014, each of which is incorporated herein by reference.

[0652] Compositions for pulmonary system delivery may include aqueous solutions, e.g., for intranasal or oral inhalative administration, suitable carriers composed of, e.g., lipids (liposomes, niosomes, microemulsions, lipidic micelles, solid lipid nanoparticles) or polymers (polymer micelles, dendrimers, polymeric nanoparticles, nonogels, nanocapsules), adjuvant, e.g., for oral inhalative administration. Aqueous compositions may be sterile and may optionally contain buffers, diluents, absorbtion enhancers and other suitable additives.

[0653] Compositions and formulations for parenteral, intraparenchymal (into the brain), intrathecal, intraventricular or intrahepatic administration can include sterile aqueous solutions which can also contain buffers, diluents and other suitable additives such as, but not limited to, penetration enhancers, carrier compounds and other pharmaceutically acceptable carriers or excipients.

[0654] Pharmaceutical compositions of the present disclosure include, but are not limited to, solutions, emulsions, and liposome-containing formulations. These compositions can be generated from a variety of components that include, but are not limited to, preformed liquids, self-emulsifying solids and self-emulsifying semisolids. Particularly useful formulations include those that target the brain when treating DPP4-associated diseases or disorders.

[0655] The pharmaceutical formulations of the present disclosure, which can conveniently be presented in unit dosage form, can be prepared according to conventional techniques well known in the pharmaceutical industry. Such techniques include the step of bringing into association the active ingredients with the pharmaceutical carrier(s) or excipient(s). In general, the formulations are prepared by uniformly and intimately bringing into association the active ingredients with liquid carriers or finely divided solid carriers or both, and then, if necessary, shaping the product.

[0656] The compositions of the present disclosure can be formulated into any of many possible dosage forms such as, but not limited to, tablets, capsules, gel capsules, liquid syrups, soft gels, suppositories, and enemas. The compositions of the present disclosure can also be formulated as suspensions in aqueous, non-aqueous or mixed media. Aqueous suspensions can further contain substances which increase the viscosity of the suspension including, for example, sodium carboxymethylcellulose, sorbitol or dextran. The suspension can also contain stabilizers.

[0657] Additional Formulations

[0658] i. Emulsions

[0659] The compositions of the present disclosure can be prepared and formulated as emulsions. Emulsions are typically heterogeneous systems of one liquid dispersed in another in the form of droplets usually exceeding 0.1 m in diameter (see e.g., Ansel's Pharmaceutical Dosage Forms and Drug Delivery Systems, Allen, LV., Popovich NG., and Ansel HC., 2004, Lippincott Williams & Wilkins (8th ed.), New York, NY; Idson, in Pharmaceutical Dosage Forms, Lieberman, Rieger and Banker (Eds.), 1988, Marcel Dekker, Inc., New York, N.Y., volume 1, p. 199; Rosoff, in Pharmaceutical Dosage Forms, Lieberman, Rieger and Banker (Eds.), 1988, Marcel Dekker, Inc., New York, N.Y., Volume 1, p. 245; Block in Pharmaceutical Dosage Forms, Lieberman, Rieger and Banker (Eds.), 1988, Marcel Dekker, Inc., New York, N.Y., volume 2, p. 335; Higuchi et al., in Remington's Pharmaceutical Sciences, Mack Publishing Co., Easton, Pa., 1985, p. 301). Emulsions are often biphasic systems comprising two immiscible liquid phases intimately mixed and dispersed with each other. In general, emulsions can be of either the water-in-oil (w/o) or the oil-in-water (o/w) variety. When an aqueous phase is finely divided into and dispersed as minute droplets into a bulk oily phase, the resulting composition is called a water-in-oil (w/o) emulsion. Alternatively, when an oily phase is finely divided into and dispersed as minute droplets into a bulk aqueous phase, the resulting composition is called an oil-in-water (o/w) emulsion. Emulsions can contain additional components in addition to the dispersed phases, and the active drug which can be present as a solution in either aqueous phase, oily phase or itself as a separate phase. Pharmaceutical excipients such as emulsifiers, stabilizers, dyes, and anti-oxidants can also be present in emulsions as needed. Pharmaceutical emulsions can also be multiple emulsions that are comprised of more than two phases such as, for example, in the case of oil-in-water-in-oil (o/w/o) and water-in-oil-in-water (w/o/w) emulsions. Such complex formulations often provide certain advantages that simple binary emulsions do not. Multiple emulsions in which individual oil droplets of an o/w emulsion enclose small water droplets constitute a w/o/w emulsion. Likewise, a system of oil droplets enclosed in globules of water stabilized in an oily continuous phase provides an o/w/o emulsion.

[0660] Emulsions are characterized by little or no thermodynamic stability. Often, the dispersed or discontinuous phase of the emulsion is well dispersed into the external or continuous phase and maintained in this form through the means of emulsifiers or the viscosity of the formulation. Either of the phases of the emulsion can be a semisolid or a solid, as is the case of emulsion-style ointment bases and creams. Other means of stabilizing emulsions entail the use of emulsifiers that can be incorporated into either phase of the emulsion. Emulsifiers can broadly be classified into four categories: synthetic surfactants, naturally occurring emulsifiers, absorption bases, and finely dispersed solids (see e.g., Ansel's Pharmaceutical Dosage Forms and Drug Delivery Systems, Allen, LV., Popovich NG., and Ansel HC., 2004, Lippincott Williams & Wilkins (8th ed.), New York, NY; Idson, in Pharmaceutical Dosage Forms, Lieberman, Rieger and Banker (Eds.), 1988, Marcel Dekker, Inc., New York, N.Y., volume 1, p. 199).

[0661] Synthetic surfactants, also known as surface active agents, have found wide applicability in the formulation of emulsions and have been reviewed in the literature (see e.g., Ansel's Pharmaceutical Dosage Forms and Drug Delivery Systems, Allen, LV., Popovich NG., and Ansel HC., 2004, Lippincott Williams & Wilkins (8th ed.), New York, NY; Rieger, in Pharmaceutical Dosage Forms, Lieberman, Rieger and Banker (Eds.), 1988, Marcel Dekker, Inc., New York, N.Y., volume 1, p. 285; Idson, in Pharmaceutical Dosage Forms, Lieberman, Rieger and Banker (Eds.), Marcel Dekker, Inc., New York, N.Y., 1988, volume 1, p. 199). Surfactants are typically amphiphilic and comprise a hydrophilic and a hydrophobic portion. The ratio of the hydrophilic to the hydrophobic nature of the surfactant has been termed the hydrophile/lipophile balance (HLB) and is a valuable tool in categorizing and selecting surfactants in the preparation of formulations. Surfactants can be classified into different classes based on the nature of the hydrophilic group: nonionic, anionic, cationic and amphoteric (see e.g., Ansel's Pharmaceutical Dosage Forms and Drug Delivery Systems, Allen, LV., Popovich NG., and Ansel HC., 2004, Lippincott Williams & Wilkins (8th ed.), New York, NY Rieger, in Pharmaceutical Dosage Forms, Lieberman, Rieger and Banker (Eds.), 1988, Marcel Dekker, Inc., New York, N.Y., volume 1, p. 285).

[0662] Naturally occurring emulsifiers used in emulsion formulations include lanolin, beeswax, phosphatides, lecithin and acacia. Absorption bases possess hydrophilic properties such that they can soak up water to form w/o emulsions yet retain their semisolid consistencies, such as anhydrous lanolin and hydrophilic petrolatum. Finely divided solids have also been used as good emulsifiers especially in combination with surfactants and in viscous preparations. These include polar inorganic solids, such as heavy metal hydroxides, nonswelling clays such as bentonite, attapulgite, hectorite, kaolin, montmorillonite, colloidal aluminum silicate and colloidal magnesium aluminum silicate, pigments and nonpolar solids such as carbon or glyceryl tristearate.

[0663] A large variety of non-emulsifying materials are also included in emulsion formulations and contribute to the properties of emulsions. These include fats, oils, waxes, fatty acids, fatty alcohols, fatty esters, humectants, hydrophilic colloids, preservatives and antioxidants (Block, in Pharmaceutical Dosage Forms, Lieberman, Rieger and Banker (Eds.), 1988, Marcel Dekker, Inc., New York, N.Y., volume 1, p. 335; Idson, in Pharmaceutical Dosage Forms, Lieberman, Rieger and Banker (Eds.), 1988, Marcel Dekker, Inc., New York, N.Y., volume 1, p. 199).

[0664] Hydrophilic colloids or hydrocolloids include naturally occurring gums and synthetic polymers such as polysaccharides (for example, acacia, agar, alginic acid, carrageenan, guar gum, karaya gum, and tragacanth), cellulose derivatives (for example, carboxymethylcellulose and carboxypropylcellulose), and synthetic polymers (for example, carbomers, cellulose ethers, and carboxyvinyl polymers). These disperse or swell in water to form colloidal solutions that stabilize emulsions by forming strong interfacial films around the dispersed-phase droplets and by increasing the viscosity of the external phase.

[0665] Since emulsions often contain a number of ingredients such as carbohydrates, proteins, sterols and phosphatides that can readily support the growth of microbes, these formulations often incorporate preservatives. Commonly used preservatives included in emulsion formulations include methyl paraben, propyl paraben, quaternary ammonium salts, benzalkonium chloride, esters of p-hydroxybenzoic acid, and boric acid. Antioxidants are also commonly added to emulsion formulations to prevent deterioration of the formulation. Antioxidants used can be free radical scavengers such as tocopherols, alkyl gallates, butylated hydroxyanisole, butylated hydroxytoluene, or reducing agents such as ascorbic acid and sodium metabisulfite, and antioxidant synergists such as citric acid, tartaric acid, and lecithin.

[0666] The application of emulsion formulations via dermatological, oral and parenteral routes and methods for their manufacture have been reviewed in the literature (see e.g., Ansel's Pharmaceutical Dosage Forms and Drug Delivery Systems, Allen, LV., Popovich NG., and Ansel HC., 2004, Lippincott Williams & Wilkins (8th ed.), New York, NY; Idson, in Pharmaceutical Dosage Forms, Lieberman, Rieger and Banker (Eds.), 1988, Marcel Dekker, Inc., New York, N.Y., volume 1, p. 199). Emulsion formulations for oral delivery have been very widely used because of ease of formulation, as well as efficacy from an absorption and bioavailability standpoint (see e.g., Ansel's Pharmaceutical Dosage Forms and Drug Delivery Systems, Allen, LV., Popovich NG., and Ansel HC., 2004, Lippincott Williams & Wilkins (8th ed.), New York, NY; Rosoff, in Pharmaceutical Dosage Forms, Lieberman, Rieger and Banker (Eds.), 1988, Marcel Dekker, Inc., New York, N.Y., volume 1, p. 245; Idson, in Pharmaceutical Dosage Forms, Lieberman, Rieger and Banker (Eds.), 1988, Marcel Dekker, Inc., New York, N.Y., volume 1, p. 199). Mineral-oil base laxatives, oil-soluble vitamins and high fat nutritive preparations are among the materials that have commonly been administered orally as o/w emulsions.

[0667] ii. Microemulsions

[0668] In one embodiment of the present disclosure, the compositions of RNAi agents and nucleic acids are formulated as microemulsions. A microemulsion can be defined as a system of water, oil and amphiphile which is a single optically isotropic and thermodynamically stable liquid solution (see e.g., Ansel's Pharmaceutical Dosage Forms and Drug Delivery Systems, Allen, LV., Popovich NG., and Ansel HC., 2004, Lippincott Williams & Wilkins (8th ed.), New York, NY; Rosoff, in Pharmaceutical Dosage Forms, Lieberman, Rieger and Banker (Eds.), 1988, Marcel Dekker, Inc., New York, N.Y., volume 1, p. 245). Typically, microemulsions are systems that are prepared by first dispersing an oil in an aqueous surfactant solution and then adding a sufficient amount of a fourth component, generally an intermediate chain-length alcohol to form a transparent system. Therefore, microemulsions have also been described as thermodynamically stable, isotropically clear dispersions of two immiscible liquids that are stabilized by interfacial films of surface-active molecules (Leung and Shah, in: Controlled Release of Drugs: Polymers and Aggregate Systems, Rosoff, M., Ed., 1989, VCH Publishers, New York, pages 185-215). Microemulsions commonly are prepared via a combination of three to five components that include oil, water, surfactant, cosurfactant and electrolyte. Whether the microemulsion is of the water-in-oil (w/o) or an oil-in-water (o/w) type is dependent on the properties of the oil and surfactant used, and on the structure and geometric packing of the polar heads and hydrocarbon tails of the surfactant molecules (Schott, in Remington's Pharmaceutical Sciences, Mack Publishing Co., Easton, Pa., 1985, p. 271).

[0669] The phenomenological approach utilizing phase diagrams has been extensively studied and has yielded a comprehensive knowledge, to one skilled in the art, of how to formulate microemulsions (see e.g., Ansel's Pharmaceutical Dosage Forms and Drug Delivery Systems, Allen, LV., Popovich NG., and Ansel HC., 2004, Lippincott Williams & Wilkins (8th ed.), New York, NY; Rosoff, in Pharmaceutical Dosage Forms, Lieberman, Rieger and Banker (Eds.), 1988, Marcel Dekker, Inc., New York, N.Y., volume 1, p. 245; Block, in Pharmaceutical Dosage Forms, Lieberman, Rieger and Banker (Eds.), 1988, Marcel Dekker, Inc., New York, N.Y., volume 1, p. 335). Compared to conventional emulsions, microemulsions offer the advantage of solubilizing water-insoluble drugs in a formulation of thermodynamically stable droplets that are formed spontaneously.

[0670] Surfactants used in the preparation of microemulsions include, but are not limited to, ionic surfactants, non-ionic surfactants, Brij 96, polyoxyethylene oleyl ethers, polyglycerol fatty acid esters, tetraglycerol monolaurate (ML310), tetraglycerol monooleate (MO310), hexaglycerol monooleate (PO310), hexaglycerol pentaoleate (PO500), decaglycerol monocaprate (MCA750), decaglycerol monooleate (MO750), decaglycerol sequioleate (SO750), decaglycerol decaoleate (DA0750), alone or in combination with cosurfactants. The cosurfactant, usually a short-chain alcohol such as ethanol, 1-propanol, and 1-butanol, serves to increase the interfacial fluidity by penetrating into the surfactant film and consequently creating a disordered film because of the void space generated among surfactant molecules. Microemulsions can, however, be prepared without the use of cosurfactants and alcohol-free self-emulsifying microemulsion systems are known in the art. The aqueous phase can typically be, but is not limited to, water, an aqueous solution of the drug, glycerol, PEG300, PEG400, polyglycerols, propylene glycols, and derivatives of ethylene glycol. The oil phase can include, but is not limited to, materials such as Captex 300, Captex 355, Capmul MCM, fatty acid esters, medium chain (C8-C12) mono, di, and tri-glycerides, polyoxyethylated glyceryl fatty acid esters, fatty alcohols, polyglycolized glycerides, saturated polyglycolized C8-C10 glycerides, vegetable oils and silicone oil.

[0671] Microemulsions are particularly of interest from the standpoint of drug solubilization and the enhanced absorption of drugs. Lipid based microemulsions (both o/w and w/o) have been proposed to enhance the oral bioavailability of drugs, including peptides (see e.g., U.S. Pat. Nos. 6,191,105; 7,063,860; 7,070,802; 7,157,099; Constantinides et al., Pharmaceutical Research, 1994, 11, 1385-1390; Ritschel, Meth. Find. Exp. Clin. Pharmacol., 1993, 13, 205). Microemulsions afford advantages of improved drug solubilization, protection of drug from enzymatic hydrolysis, possible enhancement of drug absorption due to surfactant-induced alterations in membrane fluidity and permeability, ease of preparation, ease of oral administration over solid dosage forms, improved clinical potency, and decreased toxicity (see e.g., U.S. Pat. Nos. 6,191,105; 7,063,860; 7,070,802; 7,157,099; Constantinides et al., Pharmaceutical Research, 1994, 11, 1385; Ho et al., J. Pharm. Sci., 1996, 85, 138-143). Often microemulsions can form spontaneously when their components are brought together at ambient temperature. This can be particularly advantageous when formulating thermolabile drugs, peptides or RNAi agents. Microemulsions have also been effective in the transdermal delivery of active components in both cosmetic and pharmaceutical applications. It is expected that the microemulsion compositions and formulations of the present disclosure will facilitate the increased systemic absorption of RNAi agents and nucleic acids from the gastrointestinal tract, as well as improve the local cellular uptake of RNAi agents and nucleic acids.

[0672] Microemulsions of the present disclosure can also contain additional components and additives such as sorbitan monostearate (Grill 3), Labrasol, and penetration enhancers to improve the properties of the formulation and to enhance the absorption of the RNAi agents and nucleic acids of the present disclosure. Penetration enhancers used in the microemulsions of the present disclosure can be classified as belonging to one of five broad categories—surfactants, fatty acids, bile salts, chelating agents, and non-chelating non-surfactants (Lee et al., Critical Reviews in Therapeutic Drug Carrier Systems, 1991, p. 92). Each of these classes has been discussed above.

[0673] iii. Microparticles

[0674] An RNAi agent of the disclosure may be incorporated into a particle, e.g., a microparticle. Microparticles can be produced by spray-drying, but may also be produced by other methods including lyophilization, evaporation, fluid bed drying, vacuum drying, or a combination of these techniques.

[0675] iv. Penetration Enhancers

[0676] In one embodiment, the present disclosure employs various penetration enhancers to effect the efficient delivery of nucleic acids, particularly RNAi agents, to the skin of animals. Most drugs are present in solution in both ionized and nonionized forms. However, usually only lipid soluble or lipophilic drugs readily cross cell membranes. It has been discovered that even non-lipophilic drugs can cross cell membranes if the membrane to be crossed is treated with a penetration enhancer. In addition to aiding the diffusion of non-lipophilic drugs across cell membranes, penetration enhancers also enhance the permeability of lipophilic drugs.

[0677] Penetration enhancers can be classified as belonging to one of five broad categories, i.e., surfactants, fatty acids, bile salts, chelating agents, and non-chelating non-surfactants (see e.g., Malmsten, M. Surfactants and polymers in drug delivery, Informa Health Care, New York, NY, 2002; Lee et al., Critical Reviews in Therapeutic Drug Carrier Systems, 1991, p. 92). Each of the above mentioned classes of penetration enhancers are described below in greater detail.

[0678] Surfactants (or “surface-active agents”) are chemical entities which, when dissolved in an aqueous solution, reduce the surface tension of the solution or the interfacial tension between the aqueous solution and another liquid, with the result that absorption of RNAi agents through the mucosa is enhanced. In addition to bile salts and fatty acids, these penetration enhancers include, for example, sodium lauryl sulfate, polyoxyethylene-9-lauryl ether and polyoxyethylene-20-cetyl ether) (see e.g., Malmsten, M. Surfactants and polymers in drug delivery, Informa Health Care, New York, NY, 2002; Lee et al., Critical Reviews in Therapeutic Drug Carrier Systems, 1991, p. 92); and perfluorochemical emulsions, such as FC-43. Takahashi et al., J. Pharm. Pharmacol., 1988, 40, 252).

[0679] Various fatty acids and their derivatives which act as penetration enhancers include, for example, oleic acid, lauric acid, capric acid (n-decanoic acid), myristic acid, palmitic acid, stearic acid, linoleic acid, linolenic acid, dicaprate, tricaprate, monoolein (1-monooleoyl-rac-glycerol), dilaurin, caprylic acid, arachidonic acid, glycerol 1-monocaprate, 1-dodecylazacycloheptan-2-one, acylcarnitines, acylcholines, C₁₋₂₀ alkyl esters thereof (e.g., methyl, isopropyl and t-butyl), and mono- and di-glycerides thereof (i.e., oleate, laurate, caprate, myristate, palmitate, stearate, linoleate, etc.) (see e.g., Touitou, E., et al. Enhancement in Drug Delivery, CRC Press, Danvers, M A, 2006; Lee et al., Critical Reviews in Therapeutic Drug Carrier Systems, 1991, p. 92; Muranishi, Critical Reviews in Therapeutic Drug Carrier Systems, 1990, 7, 1-33; El Hariri et al., J. Pharm. Pharmacol., 1992, 44, 651-654).

[0680] The physiological role of bile includes the facilitation of dispersion and absorption of lipids and fat-soluble vitamins (see e.g., Malmsten, M. Surfactants and polymers in drug delivery, Informa Health Care, New York, NY, 2002; Brunton, Chapter 38 in: Goodman & Gilman's The Pharmacological Basis of Therapeutics, 9th Ed., Hardman et al. Eds., McGraw-Hill, New York, 1996, pp. 934-935). Various natural bile salts, and their synthetic derivatives, act as penetration enhancers. Thus the term “bile salts” includes any of the naturally occurring components of bile as well as any of their synthetic derivatives. Suitable bile salts include, for example, cholic acid (or its pharmaceutically acceptable sodium salt, sodium cholate), dehydrocholic acid (sodium dehydrocholate), deoxycholic acid (sodium deoxycholate), glucholic acid (sodium glucholate), glycholic acid (sodium glycocholate), glycodeoxycholic acid (sodium glycodeoxycholate), taurocholic acid (sodium taurocholate), taurodeoxycholic acid (sodium taurodeoxycholate), chenodeoxycholic acid (sodium chenodeoxycholate), ursodeoxycholic acid (UDCA), sodium tauro-24,25-dihydro-fusidate (STDHF), sodium glycodihydrofusidate and polyoxyethylene-9-lauryl ether (POE) (see e.g., Malmsten, M. Surfactants and polymers in drug delivery, Informa Health Care, New York, NY, 2002; Lee et al., Critical Reviews in Therapeutic Drug Carrier Systems, 1991, page 92; Swinyard, Chapter 39 In: Remington's Pharmaceutical Sciences, 18th Ed., Gennaro, ed., Mack Publishing Co., Easton, Pa., 1990, pages 782-783; Muranishi, Critical Reviews in Therapeutic Drug Carrier Systems, 1990, 7, 1-33; Yamamoto et al., J. Pharm. Exp. Ther., 1992, 263, 25; Yamashita et al., J. Pharm. Sci., 1990, 79, 579-583).

[0681] Chelating agents, as used in connection with the present disclosure, can be defined as compounds that remove metallic ions from solution by forming complexes therewith, with the result that absorption of RNAi agents through the mucosa is enhanced. With regards to their use as penetration enhancers in the present disclosure, chelating agents have the added advantage of also serving as DNase inhibitors, as most characterized DNA nucleases require a divalent metal ion for catalysis and are thus inhibited by chelating agents (Jarrett, J. Chromatogr., 1993, 618, 315-339). Suitable chelating agents include but are not limited to disodium ethylenediaminetetraacetate (EDTA), citric acid, salicylates (e.g., sodium salicylate, 5-methoxysalicylate and homovanilate), N-acyl derivatives of collagen, laureth-9 and N-amino acyl derivatives of beta-diketones (enamines)(see e.g., Katdare, A. et al., Excipient development for pharmaceutical, biotechnology, and drug delivery, CRC Press, Danvers, M A, 2006; Lee et al., Critical Reviews in Therapeutic Drug Carrier Systems, 1991, page 92; Muranishi, Critical Reviews in Therapeutic Drug Carrier Systems, 1990, 7, 1-33; Buur et al., J. Control Rel., 1990, 14, 43-51).

[0682] As used herein, non-chelating non-surfactant penetration enhancing compounds can be defined as compounds that demonstrate insignificant activity as chelating agents or as surfactants but that nonetheless enhance absorption of RNAi agents through the alimentary mucosa (see e.g., Muranishi, Critical Reviews in Therapeutic Drug Carrier Systems, 1990, 7, 1-33). This class of penetration enhancers includes, for example, unsaturated cyclic ureas, 1-alkyl- and 1-alkenylazacyclo-alkanone derivatives (Lee et al., Critical Reviews in Therapeutic Drug Carrier Systems, 1991, page 92); and non-steroidal anti-inflammatory agents such as diclofenac sodium, indomethacin and phenylbutazone (Yamashita et al., J. Pharm. Pharmacol., 1987, 39, 621-626).

[0683] Agents that enhance uptake of RNAi agents at the cellular level can also be added to the pharmaceutical and other compositions of the present disclosure. For example, cationic lipids, such as lipofectin (Junichi et al, U.S. Pat. No. 5,705,188), cationic glycerol derivatives, and polycationic molecules, such as polylysine (WO 97/30731), are also known to enhance the cellular uptake of dsRNAs.

[0684] Other agents can be utilized to enhance the penetration of the administered nucleic acids, including glycols such as ethylene glycol and propylene glycol, pyrrols such as 2-pyrrol, azones, and terpenes such as limonene and menthone.

[0685] vi. Excipients

[0686] In contrast to a carrier compound, a “pharmaceutical carrier” or “excipient” is a pharmaceutically acceptable solvent, suspending agent or any other pharmacologically inert vehicle for delivering one or more nucleic acids to an animal. The excipient can be liquid or solid and is selected, with the planned manner of administration in mind, so as to provide for the desired bulk, consistency, etc., when combined with a nucleic acid and the other components of a given pharmaceutical composition. Typical pharmaceutical carriers include, but are not limited to, binding agents (e.g., pregelatinized maize starch, polyvinylpyrrolidone or hydroxypropyl methylcellulose, etc.); fillers (e.g., lactose and other sugars, microcrystalline cellulose, pectin, gelatin, calcium sulfate, ethyl cellulose, polyacrylates or calcium hydrogen phosphate, etc.); lubricants (e.g., magnesium stearate, talc, silica, colloidal silicon dioxide, stearic acid, metallic stearates, hydrogenated vegetable oils, corn starch, polyethylene glycols, sodium benzoate, sodium acetate, etc.); disintegrants (e.g., starch, sodium starch glycolate, etc.); and wetting agents (e.g., sodium lauryl sulphate, etc).

[0687] Pharmaceutically acceptable organic or inorganic excipients suitable for non-parenteral administration which do not deleteriously react with nucleic acids can also be used to formulate the compositions of the present disclosure. Suitable pharmaceutically acceptable carriers include, but are not limited to, water, salt solutions, alcohols, polyethylene glycols, gelatin, lactose, amylose, magnesium stearate, talc, silicic acid, viscous paraffin, hydroxymethylcellulose, polyvinylpyrrolidone and the like.

[0688] Formulations for topical administration of nucleic acids can include sterile and non-sterile aqueous solutions, non-aqueous solutions in common solvents such as alcohols, or solutions of the nucleic acids in liquid or solid oil bases. The solutions can also contain buffers, diluents and other suitable additives. Pharmaceutically acceptable organic or inorganic excipients suitable for non-parenteral administration which do not deleteriously react with nucleic acids can be used.

[0689] Suitable pharmaceutically acceptable excipients include, but are not limited to, water, salt solutions, alcohol, polyethylene glycols, gelatin, lactose, amylose, magnesium stearate, talc, silicic acid, viscous paraffin, hydroxymethylcellulose, polyvinylpyrrolidone and the like.

[0690] vii. Other Components

[0691] The compositions of the present disclosure can additionally contain other adjunct components conventionally found in pharmaceutical compositions, at their art-established usage levels. Thus, for example, the compositions can contain additional, compatible, pharmaceutically-active materials such as, for example, antipruritics, astringents, local anesthetics or anti-inflammatory agents, or can contain additional materials useful in physically formulating various dosage forms of the compositions of the present disclosure, such as dyes, flavoring agents, preservatives, antioxidants, opacifiers, thickening agents and stabilizers. However, such materials, when added, should not unduly interfere with the biological activities of the components of the compositions of the present disclosure. The formulations can be sterilized and, if desired, mixed with auxiliary agents, e.g., lubricants, preservatives, stabilizers, wetting agents, emulsifiers, salts for influencing osmotic pressure, buffers, colorings, flavorings or aromatic substances and the like which do not deleteriously interact with the nucleic acid(s) of the formulation.

[0692] Aqueous suspensions can contain substances which increase the viscosity of the suspension including, for example, sodium carboxymethylcellulose, sorbitol or dextran. The suspension can also contain stabilizers.

[0693] In some embodiments, pharmaceutical compositions featured in the disclosure include (a) one or more RNAi agents and (b) one or more agents which function by a non-RNAi mechanism and which are useful in treating a DPP4-associated disorder. Examples of such agents include, but are not limited to an antiviral agent, an immune stimulator, a therapeutic vaccine, a viral entry inhibitor, and a combination of any of the foregoing.

[0694] Toxicity and therapeutic efficacy of such compounds can be determined by standard pharmaceutical procedures in cell cultures or experimental animals, e.g., for determining the LD₅₀ (the dose lethal to 50% of the population) and the ED₅₀ (the dose therapeutically effective in 50% of the population). The dose ratio between toxic and therapeutic effects is the therapeutic index and it can be expressed as the ratio LD₅₀/ED₅₀. Compounds that exhibit high therapeutic indices are preferred.

[0695] The data obtained from cell culture assays and animal studies can be used in formulating a range of dosage for use in humans. The dosage of compositions featured herein in the disclosure lies generally within a range of circulating concentrations that include the ED₅₀ with little or no toxicity. The dosage can vary within this range depending upon the dosage form employed and the route of administration utilized. For any compound used in the methods featured in the disclosure, the therapeutically effective dose can be estimated initially from cell culture assays. A dose can be formulated in animal models to achieve a circulating plasma concentration range of the compound or, when appropriate, of the polypeptide product of a target sequence (e.g., achieving a decreased concentration of the polypeptide) that includes the IC₅₀ (i.e., the concentration of the test compound which achieves a half-maximal inhibition of symptoms) as determined in cell culture. Such information can be used to more accurately determine useful doses in humans. Levels in plasma can be measured, for example, by high performance liquid chromatography.

[0696] In addition to their administration, as discussed above, the RNAi agents featured in the disclosure can be administered in combination with other known agents effective in treatment of pathological processes mediated by nucleotide repeat expression. In any event, the administering physician can adjust the amount and timing of RNAi agent administration on the basis of results observed using standard measures of efficacy known in the art or described herein.

### VII. Kits

[0697] In certain aspects, the instant disclosure provides kits that include a suitable container containing a pharmaceutical formulation of a siRNA compound, e.g., a double-stranded siRNA compound, or siRNA compound, (e.g., a precursor, e.g., a larger siRNA compound which can be processed into a siRNA compound, or a DNA which encodes an siRNA compound, e.g., a double-stranded siRNA compound, or siRNA compound, or precursor thereof). In certain embodiments the individual components of the pharmaceutical formulation may be provided in one container. Alternatively, it may be desirable to provide the components of the pharmaceutical formulation separately in two or more containers, e.g., one container for a siRNA compound preparation, and at least another for a carrier compound. The kit may be packaged in a number of different configurations such as one or more containers in a single box. The different components can be combined, e.g., according to instructions provided with the kit. The components can be combined according to a method described herein, e.g., to prepare and administer a pharmaceutical composition. The kit can also include a delivery device, such as a device suitable for pulmonary administration, e.g., a device suitable for oral inhalative administration including nebulizers, metered-dose inhalers, and dry powder inhalers.

### VIII. Methods for Inhibiting DPP4 Expression

[0698] The present disclosure also provides methods of inhibiting expression of a DPP4 gene in a cell. The methods include contacting a cell with an RNAi agent, e.g., double stranded RNAi agent, in an amount effective to inhibit expression of a DPP4 gene in the cell, thereby inhibiting expression of DPP4 in the cell. In certain embodiments of the disclosure, expression of a DPP4 gene is inhibited in liver cells (e.g., hepatocytes).

[0699] Contacting of a cell with a RNAi agent, e.g., a double stranded RNAi agent, may be done in vitro or in vivo. Contacting a cell in vivo with the RNAi agent includes contacting a cell or group of cells within a subject, e.g., a human subject, with the RNAi agent. Combinations of in vitro and in vivo methods of contacting a cell are also possible.

[0700] Contacting a cell may be direct or indirect, as discussed above. Furthermore, contacting a cell may be accomplished via a targeting ligand, including any ligand described herein or known in the art. In some embodiments, the targeting ligand is a lipophilic moiety, e.g., a C16, and/or a carbohydrate moiety, e.g., a GalNAc ligand, or any other ligand that directs the RNAi agent to a site of interest. In certain embodiments, the ligand is not a cholesterol moiety. In certain embodiments, the RNAi agent does not include a targeting ligand.

[0701] The term “inhibiting,” as used herein, is used interchangeably with “reducing,” “silencing,” “downregulating,” “suppressing” and other similar terms, and includes any level of inhibition. In certain embodiments, a level of inhibition, e.g., for an RNAi agent of the instant disclosure, can be assessed in cell culture conditions, e.g., wherein cells in cell culture are transfected via Lipofectamine™-mediated transfection at a concentration in the vicinity of a cell of 10 nM or less, 1 nM or less, etc. Knockdown of a given RNAi agent can be determined via comparison of pre-treated levels in cell culture versus post-treated levels in cell culture, optionally also comparing against cells treated in parallel with a scrambled or other form of control RNAi agent. Knockdown in cell culture of, e.g., 50% or more, can thereby be identified as indicative of “inhibiting” or “reducing”, “downregulating” or “suppressing”, etc. having occurred. It is expressly contemplated that assessment of targeted mRNA or encoded protein levels (and therefore an extent of “inhibiting”, etc. caused by a RNAi agent of the disclosure) can also be assessed in in vivo systems for the RNAi agents of the instant disclosure, under properly controlled conditions as described in the art.

[0702] The phrase “inhibiting expression of a DPP4 gene” or “inhibiting expression of DPP4,” as used herein, includes inhibition of expression of any DPP4 gene (such as, e.g., a mouse DPP4 gene, a rat DPP4 gene, a monkey DPP4 gene, or a human DPP4 gene) as well as variants or mutants of a DPP4 gene that encode a DPP4 protein. Thus, the DPP4 gene may be a wild-type DPP4 gene, a mutant DPP4 gene, or a transgenic DPP4 gene in the context of a genetically manipulated cell, group of cells, or organism.

[0703] “Inhibiting expression of a DPP4 gene” includes any level of inhibition of a DPP4 gene, e.g., at least partial suppression of the expression of a DPP4 gene, such as an inhibition by at least 20%. In certain embodiments, inhibition is by at least 30%, at least 40%, at least 50%, at least about 60%, at least 70%, at least about 80%, at least 85%, at least 90%, at least 95%, at least 96%, at least 97%, at least 98%, or at least 99%; or to below the level of detection of the assay method. In certain method, inhibition is measured at a 10 nM concentration of the siRNA using the luciferase assay provided in Example 1.

[0704] The expression of a DPP4 gene may be assessed based on the level of any variable associated with DPP4 gene expression, e.g., DPP4 mRNA level or DPP4 protein level.

[0705] Inhibition may be assessed by a decrease in an absolute or relative level of one or more of these variables compared with a control level. The control level may be any type of control level that is utilized in the art, e.g., a pre-dose baseline level, or a level determined from a similar subject, cell, or sample that is untreated or treated with a control (such as, e.g., buffer only control or inactive agent control).

[0706] In some embodiments of the methods of the disclosure, expression of a DPP4 gene is inhibited by at least 20%, 30%, 40%, 50%, 60%, 70%, 80%, 85%, 90%, or 95%, or to below the level of detection of the assay. In certain embodiments, the methods include a clinically relevant inhibition of expression of DPP4, e.g. as demonstrated by a clinically relevant outcome after treatment of a subject with an agent to reduce the expression of a DPP4 gene.

[0707] Inhibition of the expression of a DPP4 gene may be manifested by a reduction of the amount of mRNA expressed by a first cell or group of cells (such cells may be present, for example, in a sample derived from a subject) in which a DPP4 gene is transcribed and which has or have been treated (e.g., by contacting the cell or cells with a RNAi agent of the disclosure, or by administering a RNAi agent of the disclosure to a subject in which the cells are or were present) such that the expression of a DPP4 gene is inhibited, as compared to a second cell or group of cells substantially identical to the first cell or group of cells but which has not or have not been so treated (control cell(s) not treated with a RNAi agent or not treated with a RNAi agent targeted to the genome of interest). The degree of inhibition may be expressed in terms of:

$$\frac{( mRNA in control cells ) - ( mRNA in treated cells )}{( mRNA in control cells )} \cdot 100 \%$$

[0708] In other embodiments, inhibition of the expression of a DPP4 gene may be assessed in terms of a reduction of a parameter that is functionally linked to a DPP4 gene expression, e.g., DPP4 protein expression, S protein priming, efficiency of viral entry, viral load. DPP4 gene silencing may be determined in any cell expressing a DPP4 gene, either endogenous or heterologous from an expression construct, and by any assay known in the art.

[0709] Inhibition of the expression of a DPP4 protein may be manifested by a reduction in the level of the DPP4 protein that is expressed by a cell or group of cells (e.g., the level of protein expressed in a sample derived from a subject). As explained above, for the assessment of genome suppression, the inhibition of protein expression levels in a treated cell or group of cells may similarly be expressed as a percentage of the level of protein in a control cell or group of cells.

[0710] A control cell or group of cells that may be used to assess the inhibition of the expression of a DPP4 gene includes a cell or group of cells that has not yet been contacted with an RNAi agent of the disclosure. For example, the control cell or group of cells may be derived from an individual subject (e.g., a human or animal subject) prior to treatment of the subject with an RNAi agent.

[0711] The level of DPP4 mRNA that is expressed by a cell or group of cells may be determined using any method known in the art for assessing RNA expression. In one embodiment, the level of expression of DPP4 in a sample is determined by detecting a transcribed polynucleotide, or portion thereof, e.g., mRNA of the DPP4 gene. RNA may be extracted from cells using RNA extraction techniques including, for example, using acid phenol/guanidine isothiocyanate extraction (RNAzol B; Biogenesis), RNeasy™ RNA preparation kits (Qiagen®) or PAXgene (PreAnalytix, Switzerland). Typical assay formats utilizing ribonucleic acid hybridization include nuclear run-on assays, RT-PCR, RNase protection assays, northern blotting, in situ hybridization, and microarray analysis. Circulating DPP4 mRNA may be detected using methods the described in WO2012/177906, the entire contents of which are hereby incorporated herein by reference.

[0712] In some embodiments, the level of expression of DPP4 is determined using a nucleic acid probe. The term “probe”, as used herein, refers to any molecule that is capable of selectively binding to a specific DPP4 nucleic acid or protein, or fragment thereof. Probes can be synthesized by one of skill in the art, or derived from appropriate biological preparations. Probes may be specifically designed to be labeled. Examples of molecules that can be utilized as probes include, but are not limited to, RNA, DNA, proteins, antibodies, and organic molecules.

[0713] Isolated mRNA can be used in hybridization or amplification assays that include, but are not limited to, Southern or northern analyses, polymerase chain reaction (PCR) analyses and probe arrays. One method for the determination of RNA levels involves contacting the isolated RNA with a nucleic acid molecule (probe) that can hybridize to DPP4 RNA. In one embodiment, the RNA is immobilized on a solid surface and contacted with a probe, for example by running the isolated RNA on an agarose gel and transferring the RNA from the gel to a membrane, such as nitrocellulose. In an alternative embodiment, the probe(s) are immobilized on a solid surface and the RNA is contacted with the probe(s), for example, in an Affymetrix® gene chip array. A skilled artisan can readily adapt known RNA detection methods for use in determining the level of DPP4 mRNA.

[0714] An alternative method for determining the level of expression of DPP4 in a sample involves the process of nucleic acid amplification or reverse transcriptase (to prepare cDNA) of for example mRNA in the sample, e.g., by RT-PCR (the experimental embodiment set forth in Mullis, 1987, U.S. Pat. No. 4,683,202), ligase chain reaction (Barany (1991) Proc. Natd. Acad. Sci. USA 88:189-193), self sustained sequence replication (Guatelli et al. (1990) Proc. Natd. Acad. Sci. USA 87:1874-1878), transcriptional amplification system (Kwoh et al. (1989) Proc. Natd. Acad. Sci. USA 86:1173-1177), Q-Beta Replicase (Lizardi et al. (1988) Bio/Technology 6:1197), rolling circle replication (Lizardi et al., U.S. Pat. No. 5,854,033) or any other nucleic acid amplification method, followed by the detection of the amplified molecules using techniques well known to those of skill in the art. These detection schemes are especially useful for the detection of nucleic acid molecules if such molecules are present in very low numbers. In particular aspects of the disclosure, the level of expression of DPP4 is determined by quantitative fluorogenic RT-PCR (i.e., the TaqMan™ System), by a Dual-Glo® Luciferase assay, or by other art-recognized method for measurement of DPP4 expression or mRNA level.

[0715] The expression level of DPP4 mRNA may be monitored using a membrane blot (such as used in hybridization analysis such as northern, Southern, dot, and the like), or microwells, sample tubes, gels, beads or fibers (or any solid support comprising bound nucleic acids). See U.S. Pat. Nos. 5,770,722, 5,874,219, 5,744,305, 5,677,195 and 5,445,934, which are incorporated herein by reference. The determination of DPP4 expression level may also comprise using nucleic acid probes in solution.

[0716] In some embodiments, the level of RNA expression is assessed using branched DNA (bDNA) assays or real time PCR (qPCR). The use of this PCR method is described and exemplified in the Examples presented herein. Such methods can also be used for the detection of DPP4 nucleic acids.

[0717] The level of DPP4 protein expression may be determined using any method known in the art for the measurement of protein levels. Such methods include, for example, electrophoresis, capillary electrophoresis, high performance liquid chromatography (HPLC), thin layer chromatography (TLC), hyperdiffusion chromatography, fluid or gel precipitin reactions, absorption spectroscopy, a colorimetric assays, spectrophotometric assays, flow cytometry, immunodiffusion (single or double), immunoelectrophoresis, western blotting, radioimmunoassay (RIA), enzyme-linked immunosorbent assays (ELISAs), immunofluorescent assays, electrochemiluminescence assays, and the like. Such assays can also be used for the detection of proteins indicative of the presence or replication of DPP4 proteins.

[0718] In some embodiments, the efficacy of the methods of the disclosure in the treatment of a DPP4-related disease is assessed by a decrease in DPP4 mRNA level (e.g, by assessment of a blood DPP4 level, or otherwise).

[0719] In some embodiments, the efficacy of the methods of the disclosure in the treatment of a DPP4-related disease is assessed by a decrease in DPP4 mRNA level (e.g, by assessment of a liver sample for DPP4 level, by biopsy, or otherwise).

[0720] In some embodiments of the methods of the disclosure, the RNAi agent is administered to a subject such that the RNAi agent is delivered to a specific site within the subject. The inhibition of expression of DPP4 may be assessed using measurements of the level or change in the level of DPP4 mRNA or DPP4 protein in a sample derived from a specific site within the subject, e.g., liver cells. In certain embodiments, the methods include a clinically relevant inhibition of expression of DPP4, e.g. as demonstrated by a clinically relevant outcome after treatment of a subject with an agent to reduce the expression of DPP4.

[0721] As used herein, the terms detecting or determining a level of an analyte are understood to mean performing the steps to determine if a material, e.g., protein, RNA, is present. As used herein, methods of detecting or determining include detection or determination of an analyte level that is below the level of detection for the method used.

### IX. Methods of Treating or Preventing DPP4-Associated Diseases

[0722] The present disclosure also provides methods of using a RNAi agent of the disclosure or a composition containing a RNAi agent of the disclosure to reduce or inhibit DPP4 expression in a cell. The methods include contacting the cell with a dsRNA of the disclosure and maintaining the cell for a time sufficient to obtain degradation of the mRNA transcripts of a DPP4 gene, thereby inhibiting expression of the DPP4 gene in the cell. Reduction in gene expression can be assessed by any methods known in the art. For example, a reduction in the expression of DPP4 may be determined by determining the mRNA expression level of a DPP4 gene using methods routine to one of ordinary skill in the art, e.g., northern blotting, qRT-PCR; by determining the protein level of a DPP4 protein using methods routine to one of ordinary skill in the art, such as western blotting, immunological techniques.

[0723] In the methods of the disclosure the cell may be contacted in vitro or in vivo, i.e., the cell may be within a subject.

[0724] A cell suitable for treatment using the methods of the disclosure may be any cell that expresses a DPP4 gene. A cell suitable for use in the methods of the disclosure may be a mammalian cell, e.g., a primate cell (such as a human cell or a non-human primate cell, e.g., a monkey cell or a chimpanzee cell), a non-primate cell (such as a rat cell, or a mouse cell. In one embodiment, the cell is a human cell, e.g., a human liver cell.

[0725] DPP4 expression is inhibited in the cell by at least about 30, 40, 50, 55, 60, 65, 70, 75, 80, 85, 90, 95, 96, 97, 98, 99, or about 100%, i.e., to below the level of detection. In certain embodiments, DPP4 expression is inhibited by at least 50%.

[0726] The in vivo methods of the disclosure may include administering to a subject a composition containing a RNAi agent, where the RNAi agent includes a nucleotide sequence that is complementary to at least a part of an RNA transcript of the DPP4 gene of the subject to be treated. When the organism to be treated is a mammal such as a human, the composition can be administered by any means known in the art including, but not limited to oral, intraperitoneal, or parenteral routes, including intracranial (e.g., intraventricular, intraparenchymal, and intrathecal), intravenous, intramuscular, subcutaneous, transdermal, airway (aerosol), nasal, rectal, and topical (including buccal and sublingual) administration. In certain embodiments, the compositions are administered by intravenous infusion or injection. In certain embodiments, the compositions are administered by subcutaneous injection. In certain embodiments, the compositions are administered orally. In certain embodiments, the compositions are administered by pulmonary delivery, e.g., oral inhalation or intranasal delivery.

[0727] In some embodiments, the administration is via a depot injection. A depot injection may release the RNAi agent in a consistent way over a prolonged time period. Thus, a depot injection may reduce the frequency of dosing needed to obtain a desired effect, e.g., a desired inhibition of DPP4, or a therapeutic or prophylactic effect. A depot injection may also provide more consistent serum concentrations. Depot injections may include subcutaneous injections or intramuscular injections. In certain embodiments, the depot injection is a subcutaneous injection.

[0728] In one embodiment, the double-stranded RNAi agent is administered by pulmonary system administration, e.g., intranasal administration or oral inhalative administration. Pulmonary system administration may be via a syringe, a dropper, atomization, or use of device, e.g., a passive breath driven or active power driven single/-multiple dose dry powder inhaler (DPI) device.

[0729] The mode of administration may be chosen based upon whether local or systemic treatment is desired and based upon the area to be treated. The route and site of administration may be chosen to enhance targeting.

[0730] In one aspect, the present disclosure also provides methods for inhibiting the expression of a DPP4 gene in a mammal. The methods include administering to the mammal a composition comprising a dsRNA that targets a DPP4 gene in a cell of the mammal and maintaining the mammal for a time sufficient to obtain degradation of the RNA transcript of the DPP4 gene, thereby inhibiting expression of the DPP4 gene in the cell. Reduction in genome expression can be assessed by any methods known it the art and by methods, e.g. qRT-PCR, described herein. Reduction in protein production can be assessed by any methods known it the art and by methods, e.g. ELISA, described herein.

[0731] The present disclosure further provides methods of treatment of a subject in need thereof. The treatment methods of the disclosure include administering an RNAi agent of the disclosure to a subject, e.g., a subject that would benefit from inhibition of DPP4 expression, in a therapeutically effective amount of a RNAi agent targeting a DPP4 gene or a pharmaceutical composition comprising a RNAi agent targeting a DPP4 gene.

[0732] In addition, the present disclosure provides methods of preventing, treating or inhibiting the progression of a DPP4-associated disease or disorder, e.g., a metabolic disease, e.g., diabetes or a lipid metabolism disorder.

[0733] The methods include administering to the subject a therapeutically effective amount of any of the RNAi agent, e.g., dsRNA agents, or the pharmaceutical composition provided herein, thereby preventing, treating, or inhibiting the progression of the DPP4-associated disease or disorder in the subject.

[0734] An RNAi agent of the disclosure may be administered as a “free RNAi agent.” A free RNAi agent is administered in the absence of a pharmaceutical composition. The naked RNAi agent may be in a suitable buffer solution. The buffer solution may comprise acetate, citrate, prolamine, carbonate, or phosphate, or any combination thereof. In one embodiment, the buffer solution is phosphate buffered saline (PBS). The pH and osmolarity of the buffer solution containing the RNAi agent can be adjusted such that it is suitable for administering to a subject. In certain embodiments, the free RNAi agent may be formulated in water or normal saline.

[0735] Alternatively, an RNAi agent of the disclosure may be administered as a pharmaceutical composition, such as a dsRNA liposomal formulation.

[0736] Subjects that would benefit from a reduction or inhibition of DPP4 gene expression are those having a DPP4-associated disease, subjects at risk of developing a DPP4-associate disease.

[0737] Non-limiting examples of metabolic diseases include disorders of carbohydrates, e.g., diabetes (type I and type II diabetes), galactosemia, hereditary fructose intolerance, fructose 1,6-diphosphatase deficiency, glycogen storage disorders, congenital disorders of glycosylation, insulin resistance, insulin insufficiency, hyperinsulinemia, impaired glucose tolerance (IGT), abnormal glycogen metabolism; disorders of amino acid metabolism, e.g., maple syrup urine disease (MSUD), or homocystinuria; disorder of organic acid metabolism, e.g., methylmalonic aciduria, 3-methylglutaconic aciduria—Barth syndrome, glutaric aciduria or 2-hydroxyglutaric aciduria—D and L forms; disorders of faccy acid beta-oxidation, e.g., medium-chain acyl-CoA dehydrogenase deficiency (MCAD), long-chain 3-hydroxyacyl-CoA dehydrogenase deficiency (LCHAD), very-long-chain acyl-CoA dehydrogenase deficiency (VLCAD); disorders of lipid metabolism, e.g., GM1 Gangliosidosis, Tay-Sachs Disease, Sandhoff Disease, Fabry Disease, Gaucher Disease, Niemann-Pick Disease, Krabbe Disease, Mucolipidoses, or Mucopolysaccharidoses; mitochondrial disorders, e.g., mitochondrial cardiomyopathies; Leigh disease; mitochondrial encephalopathy, lactic acidosis, and stroke-like episodes (MELAS); myoclonic epilepsy with ragged-red fibers (MERRF); neuropathy, ataxia, and retinitis pigmentosa (NARP); Barth syndrome; or peroxisomal disorders, e.g., Zellweger Syndrome (cerebrohepatorenal syndrome), X-Linked Adrenoleukodystrophy or Refsum Disease.

[0738] The disclosure further provides methods for the use of a RNAi agent or a pharmaceutical composition thereof, e.g., for treating a subject that would benefit from reduction or inhibition of DPP4 expression, e.g., a subject having a DPP4-associated disorder, in combination with other pharmaceuticals or other therapeutic methods, e.g., with known pharmaceuticals or known therapeutic methods, such as, for example, those which are currently employed for treating these disorders. For example, in certain embodiments, an RNAi agent targeting DPP4 is administered in combination with, e.g., an agent useful in treating a DPP4-associated disorder as described elsewhere herein or as otherwise known in the art. For example, additional agents and treatments suitable for treating a subject that would benefit from reduction in DPP4 expression, e.g., a subject having a DPP4-associated disorder, may include agents currently used to treat symptoms of DPP4-associated disorder.

[0739] Examples of the additional therapeutic agents which can be used with an RNAi agent of the invention include, but are not limited to, diabetes mellitus-treating agents, diabetic complication-treating agents, cardiovascular diseases-treating agents, anti-hyperlipemic agents, hypotensive or antihypertensive agents, anti-obesity agents, nonalcoholic steatohepatitis (NASH)-treating agents, chemotherapeutic agents, immunotherapeutic agents, immunosuppressive agents, and the like. Such combination therapies may advantageously utilize lower dosages of the administered therapeutic agents, thus avoiding possible toxicities or complications associated with the various monotherapies.

[0740] Examples of agents for treating diabetes mellitus include insulin formulations (e.g., animal insulin formulations extracted from a pancreas of a cattle or a swine; a human insulin formulation synthesized by a gene engineering technology using microorganisms or methods), insulin sensitivity enhancing agents, pharmaceutically acceptable salts, hydrates, or solvates thereof (e.g., pioglitazone, troglitazone, rosiglitazone, netoglitazone, balaglitazone, rivoglitazone, tesaglitazar, farglitazar, CLX-0921, R-483, NIP-221, NIP-223, DRF-2189, GW-7282TAK-559, T-131, RG-12525, LY-510929, LY-519818, BMS-298585, DRF-2725, GW-1536, GI-262570, KRP-297, TZD18 (Merck), DRF-2655, and the like), alpha-glycosidase inhibitors (e.g., voglibose, acarbose, miglitol, emiglitate and the like), biguanides (e.g., phenformin, metformin, buformin and the like) or sulfonylureas (e.g., tolbutamide, glibenclamide, gliclazide, chlorpropamide, tolazamide, acetohexamide, glyclopyramide, glimepiride and the like) as well as other insulin secretion-promoting agents (e.g., repaglinide, senaglinide, nateglinide, mitiglinide, GLP-1 and the like), amyrin agonist (e.g., pramlintide and the like), phosphotyrosin phosphatase inhibitor (e.g., vanadic acid and the like) and the like.

[0741] Examples of agents for treating diabetic complications include, but are not limited to, aldose reductase inhibitors (e.g., tolrestat, epalrestat, zenarestat, zopolrestat, minalrestat, fidareatat, SK-860, CT-112 and the like), neurotrophic factors (e.g., NGF, NT-3, BDNF and the like), PKC inhibitors (e.g., LY-333531 and the like), advanced glycation end-product (AGE) inhibitors (e.g., ALT946, pimagedine, pyradoxamine, phenacylthiazolium bromide (ALT766) and the like), active oxygen quenching agents (e.g., thioctic acid or derivative thereof, a bioflavonoid including flavones, isoflavones, flavonones, procyanidins, anthocyanidins, pycnogenol, lutein, lycopene, vitamins E, coenzymes Q, and the like), cerebrovascular dilating agents (e.g., tiapride, mexiletene and the like).

[0742] Anti-hyperlipemic agents include, for example, statin-based compounds which are cholesterol synthesis inhibitors (e.g., pravastatin, simvastatin, lovastatin, atorvastatin, fluvastatin, rosuvastatin and the like), squalene synthetase inhibitors or fibrate compounds having a triglyceride-lowering effect (e.g., fenofibrate, gemfibrozil, bezafibrate, clofibrate, sinfibrate, clinofibrate and the like), niacin, PCSK9 inhibitors, triglyceride lowing agents or cholesterol sequesting agents.

[0743] Hypotensive agents include, for example, angiotensin converting enzyme inhibitors (e.g., captopril, enalapril, delapril, benazepril, cilazapril, enalapril, enalaprilat, fosinopril, lisinopril, moexipril, perindopril, quinapril, ramipril, trandolapril and the like) or angiotensin II antagonists (e.g., losartan, candesartan cilexetil, olmesartan medoxomil, eprosartan, valsartan, telmisartan, irbesartan, tasosartan, pomisartan, ripisartan forasartan, and the like) or calcium channel blockers (e.g., amlodipine) or aspirin.

[0744] Nonalcoholic steatohepatitis (NASH)-treating agents include, for example, ursodiol, pioglitazone, orlistat, betaine, rosiglitazone.

[0745] Anti-obesity agents include, for example, central antiobesity agents (e.g., dexfenfluramine, fenfluramine, phentermine, sibutramine, amfepramone, dexamphetamine, mazindol, phenylpropanolamine, clobenzorex and the like), gastrointestinal lipase inhibitors (e.g., orlistat and the like), beta 3-adrenoceptor agonists (e.g., CL-316243, SR-58611-A, UL-TG-307, SB-226552, AJ-9677, BMS-196085 and the like), peptide-based appetite-suppressing agents (e.g., leptin, CNTF and the like), cholecystokinin agonists (e.g., lintitript, FPL-15849 and the like) and the like.

[0746] Chemotherapeutic agents include, for example, alkylating agents (e.g., cyclophosphamide, iphosphamide and the like), metabolism antagonists (e.g., methotrexate, 5-fluorouracil and the like), anticancer antibiotics (e.g., mitomycin, adriamycin and the like), vegetable-derived anticancer agents (e.g., vincristine, vindesine, taxol and the like), cisplatin, carboplatin, etoposide and the like. Among these substances, 5-fluorouracil derivatives such as furtulon and neofurtulon are preferred.

[0747] Immunotherapeutic agents include, for example, microorganisms or bacterial components (e.g., muramyl dipeptide derivative, picibanil and the like), polysaccharides having immune potentiating activity (e.g., lentinan, sizofilan, krestin and the like), cytokines obtained by a gene engineering technology (e.g., interferon, interleukin (IL) and the like), colony stimulating factors (e.g., granulocyte colony stimulating factor, erythropoetin and the like) and the like. In some embodiments, the agents are IL-1, IL-2, IL-12 and the like.

[0748] Immunosuppressive agents include, for example, calcineurin inhibitor/immunophilin modulators such as cyclosporine (Sandimmune, Gengraf, Neoral), tacrolimus (Prograf, FK506), ASM 981, sirolimus (RAPA, rapamycin, Rapamune), or its derivative SDZ-RAD, glucocorticoids (prednisone, prednisolone, methylprednisolone, dexamethasone and the like), purine synthesis inhibitors (mycophenolate mofetil, MMF, CellCept®, azathioprine, cyclophosphamide), interleukin antagonists (basiliximab, daclizumab, deoxyspergualin), lymphocyte-depleting agents such as antithymocyte globulin (Thymoglobulin, Lymphoglobuline), anti-CD3 antibody (OKT3), and the like.

[0749] In addition, agents whose cachexia improving effect has been established in an animal model or at a clinical stage, such as cyclooxygenase inhibitors (e.g., indomethacin and the like), progesterone derivatives (e.g., megestrol acetate), glucosteroid (e.g., dexamethasone and the like), metoclopramide-based agents, tetrahydrocannabinol-based agents, lipid metabolism improving agents (e.g., eicosapentanoic acid and the like), growth hormones, IGF-1, antibodies against TNF-α, LIF, IL-6 and oncostatin M may also be employed concomitantly with an RNAi agent according to the present invention. Additional therapeutic agents for use in the treatment of diseases or conditions related to metabolic disorders and/or impaired neurological signaling would be apparent to the skilled artisan and are within the scope of this disclosure.

[0750] In some embodiments, second agents suitable for administration as a combination therapy in conjunction with the RNAi agents described herein are anti-fibrotic agents, such as TGFβ1 inhibitors; anti-inflammatory agents (e.g., a systemic corticosteroid (e.g., prednisone), anti-steatosis agents, anti-viral agents, immune modulators, tyrosine kinase inhibitors, and a combination of any of the foregoing.

[0751] The RNAi agent and additional therapeutic agents may be administered at the same time or in the same combination, or the additional therapeutic agent can be administered as part of a separate composition or at separate times or by another method known in the art or described herein.

[0752] In one embodiment, the method includes administering a composition featured herein such that expression of the target DPP4 gene is decreased, for at least one month. In some embodiments, expression is decreased for at least 2 months, 3 months, or 6 months.

[0753] In certain embodiments, administration includes a loading dose administered at a higher frequency, e.g., once per day, twice per week, once per week, for an initial dosing period, e.g., 2-4 doses.

[0754] In some embodiments, the RNAi agents useful for the methods and compositions featured herein specifically target RNAs (primary or processed) of the target DPP4 gene. Compositions and methods for inhibiting the expression of these genes using RNAi agents can be prepared and performed as described herein.

[0755] Administration of the dsRNA according to the methods of the disclosure may result in a reduction of the severity, signs, symptoms, or markers of such diseases or disorders in a patient with a DPP4-associated disorder. In some embodiments, administration of the dsRNA results in a reduction in blood glucose level in a subject with a DPP4-associated disorder. In other embodiments, administration of the dsRNA results in a reduction in blood lipid level in a subject with a DPP4-associated disorder. By “reduction” in this context is meant a statistically significant or clinically significant decrease in such level. The reduction can be, for example, at least 5%, 10%, 15%, 20%, 25%, 30%, 35%, 40%, 45%, 50%, 55%, 60%, 65%, 70%, 75%, 80%, 85%, 90%, 95%, or about 100%.

[0756] Efficacy of treatment or prevention of disease can be assessed, for example by measuring disease progression, disease remission, symptom severity, reduction in pain, quality of life, dose of a medication required to sustain a treatment effect, level of a disease marker or any other measurable parameter appropriate for a given disease being treated or targeted for prevention. It is well within the ability of one skilled in the art to monitor efficacy of treatment or prevention by measuring any one of such parameters, or any combination of parameters. It is well within the ability of one skilled in the art to monitor efficacy of treatment or prevention by measuring any one of such parameters, or any combination of parameters. In connection with the administration of a RNAi agent targeting DPP4 or pharmaceutical composition thereof, “effective against” a DPP4-associated disorder indicates that administration in a clinically appropriate manner results in a beneficial effect for at least a statistically significant fraction of patients, such as an improvement of symptoms, a cure, a reduction in disease, extension of life, improvement in quality of life, or other effect generally recognized as positive by medical doctors familiar with treating DPP4-associated disorders and the related causes.

[0757] A treatment or preventive effect is evident when there is a statistically significant improvement in one or more parameters of disease status, or by a failure to worsen or to develop symptoms where they would otherwise be anticipated. As an example, a favorable change of at least 10% in a measurable parameter of disease, and at least 20%, 30%, 40%, 50%, or more can be indicative of effective treatment. Efficacy for a given RNAi agent drug or formulation of that drug can also be judged using an experimental animal model for the given disease as known in the art. When using an experimental animal model, efficacy of treatment is evidenced when a statistically significant reduction in a marker or symptom is observed.

[0758] Alternatively, the efficacy can be measured by a reduction in the severity of disease as determined by one skilled in the art of diagnosis based on a clinically accepted disease severity grading scale. Any positive change resulting in e.g., lessening of severity of disease measured using the appropriate scale, represents adequate treatment using a RNAi agent or RNAi agent formulation as described herein.

[0759] Subjects can be administered a therapeutic amount of dsRNA, such as about 0.01 mg/kg to about 200 mg/kg.

[0760] The RNAi agent can be administered over a period of time, on a regular basis. In certain embodiments, after an initial treatment regimen, the treatments can be administered on a less frequent basis. Administration of the RNAi agent can reduce DPP4 levels, e.g., in a cell, tissue, blood sample or other compartment of the patient by at least 20%, 30%, 40%, 50%, 55%, 60%, 65%, 70,% 75%, 80%, 85%, 90%, 95%, 96%, 97%, 98%, or at least about 99% or more. In one embodiment, administration of the RNAi agent can reduce DPP4 levels, e.g., in a cell, tissue, blood sample, or other compartment of the patient by at least 50%.

[0761] Before administration of a full dose of the RNAi agent, patients can be administered a smaller dose, such as a 5% infusion reaction, and monitored for adverse effects, such as an allergic reaction. In another example, the patient can be monitored for unwanted immunostimulatory effects, such as increased cytokine (e.g., TNF-alpha or INF-alpha) levels.

[0762] Alternatively, the RNAi agent can be administered by oral administration, pulmonary admiration, intravenously, i.e., by intravenous injection, or subcutaneously, i.e., by subcutaneous injection. One or more injections may be used to deliver the desired, e.g., monthly dose of RNAi agent to a subject. The injections may be repeated over a period of time. The administration may be repeated on a regular basis. In certain embodiments, after an initial treatment regimen, the treatments can be administered on a less frequent basis. A repeat-dose regimen may include administration of a therapeutic amount of RNAi agent on a regular basis, such as monthly or extending to once a quarter, twice per year, once per year. In certain embodiments, the RNAi agent is administered about once per month to about once per quarter (i.e., about once every three months).

[0763] Unless otherwise defined, all technical and scientific terms used herein have the same meaning as commonly understood by one of ordinary skill in the art to which this invention belongs. Although methods and materials similar or equivalent to those described herein can be used in the practice or testing of the RNAi agents and methods featured in the invention, suitable methods and materials are described below. All publications, patent applications, patents, and other references mentioned herein are incorporated by reference in their entirety. In case of conflict, the present specification, including definitions, will control. In addition, the materials, methods, and examples are illustrative only and not intended to be limiting.

[0764] This invention is further illustrated by the following examples which should not be construed as limiting. The entire contents of all references, patents and published patent applications cited throughout this application, as well as the Figures and the Sequence Listing, are hereby incorporated herein by reference.

### EXAMPLES

### Example 1. iRNA Synthesis

[0765] Source of Reagents

[0766] Where the source of a reagent is not specifically given herein, such reagent can be obtained from any supplier of reagents for molecular biology at a quality/purity standard for application in molecular biology.

[0767] siRNA Design

[0768] The selection of siRNA designs targeting human dipeptidyl-peptidase 4 (DPP4) gene (human NCBI refseqID: NM_001935.4; NCBI GeneID: 1803) were designed using custo R and Python scripts. The human NM_001935.4 REFSEQ mRNA has a length of 3575 bases.

[0769] A detailed list of a set of the unmodified siRNA sense and antisense strand sequences targeting DPP4 is shown in Table 2.

[0770] A detailed list of a set of the modified siRNA sense and antisense strand sequences targeting DPP4 is shown in Table 3.

[0771] It is to be understood that, throughout the application, a duplex name without a decimal is equivalent to a duplex name with a decimal which merely references the batch number of the duplex. For example, AD-1230521 is equivalent to AD-1230521.

[0772] siRNA Synthesis

[0773] siRNAs were synthesized and annealed using routine methods known in the art. Briefly, siRNA sequences were synthesized on a 1 μmol scale using a Mermade 192 synthesizer (BioAutomation) with phosphoramidite chemistry on solid supports. The solid support was controlled pore glass (500-1000 Å) loaded with a custom GalNAc ligand (3′-GalNAc conjugates), universal solid support (AM Chemicals), or the first nucleotide of interest. Ancillary synthesis reagents and standard 2-cyanoethyl phosphoramidite monomers (2′-deoxy-2′-fluoro, 2′-O-methyl, RNA, DNA) were obtained from Thermo-Fisher (Milwaukee, WI), Hongene (China), or Chemgenes (Wilmington, MA, USA). Additional phosphoramidite monomers were procured from commercial suppliers, prepared in-house, or procured using custom synthesis from various CMOs. Phosphoramidites were prepared at a concentration of 100 mM in either acetonitrile or 9:1 acetonitrile:DMF and were coupled using 5-Ethylthio-1H-tetrazole (ETT, 0.25 M in acetonitrile) with a reaction time of 400 s.

[0774] Phosphorothioate linkages were generated using a 100 mM solution of 3-((Dimethylamino-methylidene) amino)-3H-1,2,4-dithiazole-3-thione (DDTT, obtained from Chemgenes (Wilmington, MA, USA)) in anhydrous acetonitrile/pyridine (9:1 v/v). Oxidation time was 5 minutes. All sequences were synthesized with final removal of the DMT group (“DMT-Off”).

[0775] Upon completion of the solid phase synthesis, solid-supported oligoribonucleotides were treated with 300 μL of Methylamine (40% aqueous) at room temperature in 96 well plates for approximately 2 hours to afford cleavage from the solid support and subsequent removal of all additional base-labile protecting groups. For sequences containing any natural ribonucleotide linkages (2′-OH) protected with a tert-butyl dimethyl silyl (TBDMS) group, a second deprotection step was performed using TEA.3HF (triethylamine trihydrofluoride). To each oligonucleotide solution in aqueous methylamine was added 200 μL of dimethyl sulfoxide (DMSO) and 300 μL TEA.3HF and the solution was incubated for approximately 30 mins at 60° C. After incubation, the plate was allowed to come to room temperature and crude oligonucleotides were precipitated by the addition of 1 mL of 9:1 acetontrile:ethanol or 1:1 ethanol:isopropanol. The plates were then centrifuged at 4° C. for 45 mins and the supernatant carefully decanted with the aid of a multichannel pipette. The oligonucleotide pellet was resuspended in 20 mM NaOAc and subsequently desalted using a HiTrap size exclusion column (5 mL, GE Healthcare) on an Agilent LC system equipped with an autosampler, UV detector, conductivity meter, and fraction collector. Desalted samples were collected in 96 well plates and then analyzed by LC-MS and UV spectrometry to confirm identity and quantify the amount of material, respectively.

[0776] Duplexing of single strands was performed on a Tecan liquid handling robot. Sense and antisense single strands were combined in an equimolar ratio to a final concentration of 10 μM in 1× PBS in 96 well plates, the plate sealed, incubated at 100° C. for 10 minutes, and subsequently allowed to return slowly to room temperature over a period of 2-3 hours. The concentration and identity of each duplex was confirmed and then subsequently utilized for in vitro screening assays.

### Example 2. In Vitro Screening of siRNA Duplexes

[0777] Cell Culture and Transfections

[0778] Hep3b cells (ATCC, Manassas, VA) were grown to near confluence at 37° C. in an atmosphere of 5% CO2 in Eagle's Minimum Essential Medium (Gibco) supplemented with 10% FBS (ATCC) before being released from the plate by trypsinization. Transfection was carried out by adding 7.5 μL of Opti-MEM plus 0.1 μL of RNAiMAX per well (Invitrogen, Carlsbad CA. cat #13778-150) to 2.5 μL of each siRNA duplex to an individual well in a 384-well plate. The mixtures were then incubated at room temperature for 15 minutes. Forty μL of complete growth media containing ˜1.5×10⁴ cells were then added to the siRNA mixture. Cells were incubated for 24 hours prior to RNA purification. Single dose experiments were performed at 10 nM. The assays were performed as quadruplicates.

[0779] Total RNA Isolation Using DYNABEADS mRNA Isolation Kit

[0780] Total RNA isolation was performed using DYNABEADS. Briefly, cells were lysed in 10 μl of Lysis/Binding Buffer containing 3 μL of beads per well and mixed for 10 minutes on an electrostatic shaker. The washing steps were automated on a Biotek EL406, using a magnetic plate support. Beads were washed (in 3 μL) once in Buffer A, once in Buffer B, and twice in Buffer E, with aspiration steps in between. Following a final aspiration, complete 12 μL RT mixture is added to each well, as described below.

[0781] cDNA Synthesis

[0782] For cDNA synthesis, a master mix of 1.5 μl 10× Buffer, 0.6 μl 10×dNTPs, 1.5 μl Random primers, 0.75 μl Reverse Transcriptase, 0.75 μl RNase inhibitor and 9.9 μl of H₂O per reaction were added per well. Plates were sealed, agitated for 10 minutes on an electrostatic shaker, and then incubated at 37 degrees C. for 2 hours. Following this, the plates were agitated at 80 degrees C. for 8 minutes.

[0783] Real time PCR Two Microlitre (μl) of cDNA were Added to a Master Mix Containing 0.5 μl of Human GAPDH TaqMan Probe (4326317E), 0.5 μl human DPP4, 2 μl nuclease-free water and 5 μl Lightcycler 480 probe master mix (Roche Cat #04887301001) per well in a 384 well plates (Roche cat #04887301001). Real time PCR was done in a LightCycler48 Real Time PCR system (Roche).

[0784] To calculate relative fold change, data were analyzed using the ΔΔCt method and normalized to assays performed with cells transfected with 10 nM AD-1955, or mock transfected cells. IC₅S were calculated using a 4 parameter fit model using XLFit and normalized to cells transfected with AD-1955 or mock-transfected. The sense and antisense sequences of AD-1955 are: sense: cuuAcGcuGAGuAcuucGAdTsdT (SEQ ID NO:35) and antisense UCGAAGuACUcAGCGuAAGdTsdT (SEQ ID NO:36).

[0785] The results of the single dose screens of the dsRNA agents listed in Tables 2 and 3 in Hep3B cells are shown in Table 4. The results are presented as the mean percent of message remaining.

TABLE 1
Abbreviations of nucleotide monomers used in nucleic acid sequence representation. It will
be understood that these monomers, when present in an oligonucleotide, are mutually linked by 5′-3′-
phosphodiester bonds; and it is understood that when the nucleotide contains a 2′-fluoro modification,
then the fluoro replaces the hydroxy at that position in the parent nucleotide
(i.e., it is a 2′-deoxy-2′-fluoronucleotide).

| Abbreviation | Nucleotide(s) |
|---|---|
| A | Adenosine-3′-phosphate |
| Ab | beta-L-adenosine-3′-phosphate |
| Abs | beta-L-adenosine-3′-phosphorothioate |
| Af | 2′-fluoroadenosine-3′-phosphate |
| Afs | 2′-fluoroadenosine-3′-phosphorothioate |
| As | adenosine-3′-phosphorothioate |
| C | cytidine-3′-phosphate |
| Cb | beta-L-cytidine-3′-phosphate |
| Cbs | beta-L-cytidine-3′-phosphorothioate |
| Cf | 2′-fluorocytidine-3′-phosphate |
| Cfs | 2′-fluorocytidine-3′-phosphorothioate |
| Cs | cytidine-3′-phosphorothioate |
| G | guanosine-3′-phosphate |
| Gb | beta-L-guanosine-3′-phosphate |
| Gbs | beta-L-guanosine-3′-phosphorothioate |
| Gf | 2′-fluoroguanosine-3′-phosphate |
| Gfs | 2′-fluoroguanosine-3′-phosphorothioate |
| Gs | guanosine-3′-phosphorothioate |
| T | 5′-methyluridine-3′-phosphate |
| Tf | 2′-fluoro-5-methyluridine-3′-phosphate |
| Tfs | 2′-fluoro-5-methyluridine-3′-phosphorothioate |
| Ts | 5-methyluridine-3′-phosphorothioate |
| U | Uridine-3′-phosphate |
| Uf | 2′-fluorouridine-3′-phosphate |
| Ufs | 2′-fluorouridine-3′-phosphorothioate |
| Us | uridine-3′-phosphorothioate |
| N | any nucleotide, modified or unmodified |
| a | 2′-O-methyladenosine-3′-phosphate |
| as | 2′-O-methyladenosine-3′-phosphorothioate |
| C | 2′-O-methylcytidine-3′-phosphate |
| CS | 2′-O-methylcytidine-3′-phosphorothioate |
| g | 2′-O-methylguanosine-3′-phosphate |
| gs | 2′-O-methylguanosine-3′-phosphorothioate |
| t | 2′-O-methyl-5-methyluridine-3′-phosphate |
| ts | 2′-O-methyl-5-methyluridine-3′-phosphorothioate |
| u | 2′-O-methyluridine-3′-phosphate |
| us | 2′-O-methyluridine-3′-phosphorothioate |
| S | phosphorothioate linkage |
| L10 | N-(cholesterylcarboxamidocaproyl)-4-hydroxyprolinol (Hyp-C6-Chol) |
| L96 | N-[tris(GalNAc-alkyl)-amidodecanoyl)]-4-hydroxyprolinol (Hyp-(GalNAc-alkyl)3) |
| | [chemical structure] |
| Y34 | 2-hydroxymethyl-tetrahydrofurane-4-methoxy-3-phosphate (abasic 2′-OMe furanose) |
| Y44 | inverted abasic DNA (2-hydroxymethyl-tetrahydrofurane-5-phosphate) |
| (Agn) | Adenosine-glycol nucleic acid (GNA) |
| (Cgn) | Cytidine-glycol nucleic acid (GNA) |
| (Ggn) | Guanosine-glycol nucleic acid (GNA) |
| (Tgn) | Thymidine-glycol nucleic acid (GNA) S-Isomer |
| P | Phosphate |
| VP | Vinyl-phosphonate |
| dA | 2′-deoxyadenosine-3′-phosphate |
| dAs | 2′-deoxyadenosine-3′-phosphorothioate |
| dC | 2′-deoxycytidine-3′-phosphate |
| dCs | 2′-deoxycytidine-3′-phosphorothioate |
| dG | 2′-deoxyguanosine-3′-phosphate |
| dGs | 2′-deoxyguanosine-3′-phosphorothioate |
| dT | 2′-deoxythymidine-3′-phosphate |
| dTs | 2′-deoxythymidine-3′-phosphorothioate |
| dU | 2′-deoxyuridine |
| dUs | 2′-deoxyuridine-3′-phosphorothioate |
| (C2p) | cytidine-2′-phosphate |
| (G2p) | guanosine-2′-phosphate |
| (U2p) | uridine-2′-phosphate |
| (A2p) | adenosine-2′-phosphate |
| (Chd) | 2′-O-hexadecyl-cytidine-3′-phosphate |
| (Ahd) | 2′-O-hexadecyl-adenosine-3′-phosphate |
| (Ghd) | 2′-O-hexadecyl-guanosine-3′-phosphate |
| (Uhd) | 2′-O-hexadecyl-uridine-3′-phosphate |

TABLE 2
Unmodified Sense and Antisense Strand DPP4 dsRNA Sequences

| | | SEQ | | SEQ | Start Site | End Site |
|---|---|---|---|---|---|---|
| Duplex | Sense Sequence | ID | Antisense Sequence | ID | in NM_ | in NM_ |
| Name | 5′ to 3′ | NO: | 5′ to 3′ | NO: | 001935.4 | 001935.4 |
| AD-1420199 | GCGCUCACUAAUGUUUAACUC | 37 | GAGUUAAACAUUAGUGAGCGCCG | 397 | 80 | 102 |
| AD-1420212 | CUUGCCAGCGGCGAGUGACUC | 38 | GAGUCACUCGCCGCUGGCAAGUU | 398 | 111 | 133 |
| AD-1420250 | UUCUGCCUGCGCUCCUUCUCU | 39 | AGAGAAGGAGCGCAGGCAGAAGU | 399 | 183 | 205 |
| AD-1420258 | GCGCUCCUUCUCUGAACGCUC | 40 | GAGCGUUCAGAGAAGGAGCGCAG | 400 | 191 | 213 |
| AD-1420264 | CUUCUCUGAACGCUCACUUCC | 41 | GGAAGUGAGCGUUCAGAGAAGGA | 401 | 197 | 219 |
| AD-1420273 | ACGCUCACUUCCGAGGAGACG | 42 | CGUCUCCUCGGAAGUGAGCGUUC | 402 | 206 | 228 |
| AD-1420282 | UCCGAGGAGACGCCGACGAUG | 43 | CAUCGUCGGCGUCUCCUCGGAAG | 403 | 215 | 237 |
| AD-1420293 | GCCGACGAUGAAGACACCGUG | 44 | CACGGUGUCUUCAUCGUCGGCGU | 404 | 226 | 248 |
| AD-1420300 | AUGAAGACACCGUGGAAGGUU | 45 | AACCUUCCACGGUGUCUUCAUCG | 405 | 233 | 255 |
| AD-1420306 | ACACCGUGGAAGGUUCUUCUG | 46 | CAGAAGAACCUUCCACGGUGUCU | 406 | 239 | 261 |
| AD-1420312 | UGGAAGGUUCUUCUGGGACUG | 47 | CAGUCCCAGAAGAACCUUCCACG | 407 | 245 | 267 |
| AD-1420338 | UGCUGCUGCGCUUGUCACCAU | 48 | AUGGUGACAAGCGCAGCAGCACC | 408 | 271 | 293 |
| AD-1420344 | UGCGCUUGUCACCAUCAUCAC | 49 | GUGAUGAUGGUGACAAGCGCAGC | 409 | 277 | 299 |
| AD-1420365 | CGUGCCCGUGGUUCUGCUGAA | 50 | UUCAGCAGAACCACGGGCACGGU | 410 | 298 | 320 |
| AD-1420371 | CGUGGUUCUGCUGAACAAAGG | 51 | CCUUUGUUCAGCAGAACCACGGG | 411 | 304 | 326 |
| AD-1420379 | UGCUGAACAAAGGCACAGAUG | 52 | CAUCUGUGCCUUUGUUCAGCAGA | 412 | 312 | 334 |
| AD-1420385 | ACAAAGGCACAGAUGAUGCUA | 53 | UAGCAUCAUCUGUGCCUUUGUUC | 413 | 318 | 340 |
| AD-1420391 | GCACAGAUGAUGCUACAGCUG | 54 | CAGCUGUAGCAUCAUCUGUGCCU | 414 | 324 | 346 |
| AD-1420399 | GAUGCUACAGCUGACAGUCGC | 55 | GCGACUGUCAGCUGUAGCAUCAU | 415 | 332 | 354 |
| AD-1420406 | CAGCUGACAGUCGCAAAACUU | 56 | AAGUUUUGCGACUGUCAGCUGUA | 416 | 339 | 361 |
| AD-1420412 | ACAGUCGCAAAACUUACACUC | 57 | GAGUGUAAGUUUUGCGACUGUCA | 417 | 345 | 367 |
| AD-1420422 | AACUUACACUCUAACUGAUUA | 58 | UAAUCAGUUAGAGUGUAAGUUUU | 418 | 355 | 377 |
| AD-1420428 | CACUCUAACUGAUUACUUAAA | 59 | UUUAAGUAAUCAGUUAGAGUGUA | 419 | 361 | 383 |
| AD-1420437 | UUAUAGACUGAAGUUAUACUC | 60 | GAGUAUAACUUCAGUCUAUAAGU | 420 | 388 | 410 |
| AD-1420446 | GAAGUUAUACUCCUUAAGAUG | 61 | CAUCUUAAGGAGUAUAACUUCAG | 421 | 397 | 419 |
| AD-1420455 | CUCCUUAAGAUGGAUUUCAGA | 62 | UCUGAAAUCCAUCUUAAGGAGUA | 422 | 406 | 428 |
| AD-1420462 | AGAUGGAUUUCAGAUCAUGAA | 63 | UUCAUGAUCUGAAAUCCAUCUUA | 423 | 413 | 435 |
| AD-1420468 | AUUUCAGAUCAUGAAUAUCUC | 64 | GAGAUAUUCAUGAUCUGAAAUCC | 424 | 419 | 441 |
| AD-1420475 | AUCAUGAAUAUCUCUACAAAC | 65 | GUUUGUAGAGAUAUUCAUGAUCU | 425 | 426 | 448 |
| AD-1420482 | AUAUCUCUACAAACAAGAAAA | 66 | UUUUCUUGUUUGUAGAGAUAUUC | 426 | 433 | 455 |
| AD-1420499 | AUCUUGGUAUUCAAUGCUGAA | 67 | UUCAGCAUUGAAUACCAAGAUAU | 427 | 458 | 480 |
| AD-1420505 | GUAUUCAAUGCUGAAUAUGGA | 68 | UCCAUAUUCAGCAUUGAAUACCA | 428 | 464 | 486 |
| AD-1420511 | AAUGCUGAAUAUGGAAACAGC | 69 | GCUGUUUCCAUAUUCAGCAUUGA | 429 | 470 | 492 |
| AD-1420518 | AAUAUGGAAACAGCUCAGUUU | 70 | AAACUGAGCUGUUUCCAUAUUCA | 430 | 477 | 499 |
| AD-1420524 | GAAACAGCUCAGUUUUCUUGG | 71 | CCAAGAAAACUGAGCUGUUUCCA | 431 | 483 | 505 |
| AD-1420534 | AGUUUUCUUGGAGAACAGUAC | 72 | GUACUGUUCUCCAAGAAAACUGA | 432 | 493 | 515 |
| AD-1420543 | GGAGAACAGUACAUUUGAUGA | 73 | UCAUCAAAUGUACUGUUCUCCAA | 433 | 502 | 524 |
| AD-1420549 | CAGUACAUUUGAUGAGUUUGG | 74 | CCAAACUCAUCAAAUGUACUGUU | 434 | 508 | 530 |
| AD-1420557 | UUGAUGAGUUUGGACAUUCUA | 75 | UAGAAUGUCCAAACUCAUCAAAU | 435 | 516 | 538 |
| AD-1420563 | AGUUUGGACAUUCUAUCAAUG | 76 | CAUUGAUAGAAUGUCCAAACUCA | 436 | 522 | 544 |
| AD-1420569 | GACAUUCUAUCAAUGAUUAUU | 77 | AAUAAUCAUUGAUAGAAUGUCCA | 437 | 528 | 550 |
| AD-1420576 | AUGAUUAUUCAAUAUCUCCUG | 78 | CAGGAGAUAUUGAAUAAUCAUUG | 438 | 540 | 562 |
| AD-1420593 | CCUGAUGGGCAGUUUAUUCUC | 79 | GAGAAUAAACUGCCCAUCAGGAG | 439 | 557 | 579 |
| AD-1420601 | GCAGUUUAUUCUCUUAGAAUA | 80 | UAUUCUAAGAGAAUAAACUGCCC | 440 | 565 | 587 |
| AD-1420611 | CUCUUAGAAUACAACUACGUG | 81 | CACGUAGUUGUAUUCUAAGAGAA | 441 | 575 | 597 |
| AD-1420619 | AUACAACUACGUGAAGCAAUG | 82 | CAUUGCUUCACGUAGUUGUAUUC | 442 | 583 | 605 |
| AD-1420628 | CGUGAAGCAAUGGAGGCAUUC | 83 | GAAUGCCUCCAUUGCUUCACGUA | 443 | 592 | 614 |
| AD-1420640 | GAGGCAUUCCUACACAGCUUC | 84 | GAAGCUGUGUAGGAAUGCCUCCA | 444 | 604 | 626 |
| AD-1420646 | UUCCUACACAGCUUCAUAUGA | 85 | UCAUAUGAAGCUGUGUAGGAAUG | 445 | 610 | 632 |
| AD-1420652 | CACAGCUUCAUAUGACAUUUA | 86 | UAAAUGUCAUAUGAAGCUGUGUA | 446 | 616 | 638 |
| AD-1420658 | UUCAUAUGACAUUUAUGAUUU | 87 | AAAUCAUAAAUGUCAUAUGAAGC | 447 | 622 | 644 |
| AD-1420662 | UGAUUUAAAUAAAAGGCAGCU | 88 | AGCUGCCUUUUAUUUAAAUCAUA | 448 | 637 | 659 |
| AD-1420668 | AAAUAAAAGGCAGCUGAUUAC | 89 | GUAAUCAGCUGCCUUUUAUUUAA | 449 | 643 | 665 |
| AD-1420675 | AGGCAGCUGAUUACAGAAGAG | 90 | CUCUUCUGUAAUCAGCUGCCUUU | 450 | 650 | 672 |
| AD-1420682 | UGAUUACAGAAGAGAGGAUUC | 91 | GAAUCCUCUCUUCUGUAAUCAGC | 451 | 657 | 679 |
| AD-1420691 | AAGAGAGGAUUCCAAACAACA | 92 | UGUUGUUUGGAAUCCUCUCUUCU | 452 | 666 | 688 |
| AD-1420698 | GAUUCCAAACAACACACAGUG | 93 | CACUGUGUGUUGUUUGGAAUCCU | 453 | 673 | 695 |
| AD-1420707 | CAACACACAGUGGGUCACAUG | 94 | CAUGUGACCCACUGUGUGUUGUU | 454 | 682 | 704 |
| AD-1420717 | UGGGUCACAUGGUCACCAGUG | 95 | CACUGGUGACCAUGUGACCCACU | 455 | 692 | 714 |
| AD-1420725 | AUGGUCACCAGUGGGUCAUAA | 96 | UUAUGACCCACUGGUGACCAUGU | 456 | 700 | 722 |
| AD-1420734 | AGUGGGUCAUAAAUUGGCAUA | 97 | UAUGCCAAUUUAUGACCCACUGG | 457 | 709 | 731 |
| AD-1420741 | CAUAAAUUGGCAUAUGUUUGG | 98 | CCAAACAUAUGCCAAUUUAUGAC | 458 | 716 | 738 |
| AD-1420749 | GGCAUAUGUUUGGAACAAUGA | 99 | UCAUUGUUCCAAACAUAUGCCAA | 459 | 724 | 746 |
| AD-1420759 | UGGAACAAUGACAUUUAUGUU | 100 | AACAUAAAUGUCAUUGUUCCAAA | 460 | 734 | 756 |
| AD-1420773 | UUGAACCAAAUUUACCAAGUU | 101 | AACUUGGUAAAUUUGGUUCAAUU | 461 | 759 | 781 |
| AD-1420779 | CAAAUUUACCAAGUUACAGAA | 102 | UUCUGUAACUUGGUAAAUUUGGU | 462 | 765 | 787 |
| AD-1420786 | ACCAAGUUACAGAAUCACAUG | 103 | CAUGUGAUUCUGUAACUUGGUAA | 463 | 772 | 794 |
| AD-1420792 | UUACAGAAUCACAUGGACGGG | 104 | CCCGUCCAUGUGAUUCUGUAACU | 464 | 778 | 800 |
| AD-1420797 | UAUAAUGGAAUAACUGACUGG | 105 | CCAGUCAGUUAUUCCAUUAUAUA | 465 | 815 | 837 |
| AD-1420804 | GAAUAACUGACUGGGUUUAUG | 106 | CAUAAACCCAGUCAGUUAUUCCA | 466 | 822 | 844 |
| AD-1420812 | GACUGGGUUUAUGAAGAGGAA | 107 | UUCCUCUUCAUAAACCCAGUCAG | 467 | 830 | 852 |
| AD-1420818 | GUUUAUGAAGAGGAAGUCUUC | 108 | GAAGACUUCCUCUUCAUAAACCC | 468 | 836 | 858 |
| AD-1420824 | GAAGAGGAAGUCUUCAGUGCC | 109 | GGCACUGAAGACUUCCUCUUCAU | 469 | 842 | 864 |
| AD-1420831 | AAGUCUUCAGUGCCUACUCUG | 110 | CAGAGUAGGCACUGAAGACUUCC | 470 | 849 | 871 |
| AD-1420841 | UGCCUACUCUGCUCUGUGGUG | 111 | CACCACAGAGCAGAGUAGGCACU | 471 | 859 | 881 |
| AD-1420853 | UCUGUGGUGGUCUCCAAACGG | 112 | CCGUUUGGAGACCACCACAGAGC | 472 | 871 | 893 |
| AD-1420861 | GGUCUCCAAACGGCACUUUUU | 113 | AAAAAGUGCCGUUUGGAGACCAC | 473 | 879 | 901 |
| AD-1420864 | UAGCAUAUGCCCAAUUUAACG | 114 | CGUUAAAUUGGGCAUAUGCUAAA | 474 | 900 | 922 |
| AD-1420871 | UGCCCAAUUUAACGACACAGA | 115 | UCUGUGUCGUUAAAUUGGGCAUA | 475 | 907 | 929 |
| AD-1420878 | UUUAACGACACAGAAGUCCCA | 116 | UGGGACUUCUGUGUCGUUAAAUU | 476 | 914 | 936 |
| AD-1420887 | ACAGAAGUCCCACUUAUUGAA | 117 | UUCAAUAAGUGGGACUUCUGUGU | 477 | 923 | 945 |
| AD-1420893 | GUCCCACUUAUUGAAUACUCC | 118 | GGAGUAUUCAAUAAGUGGGACUU | 478 | 929 | 951 |
| AD-1420901 | UAUUGAAUACUCCUUCUACUC | 119 | GAGUAGAAGGAGUAUUCAAUAAG | 479 | 937 | 959 |
| AD-1420910 | CUCCUUCUACUCUGAUGAGUC | 120 | GACUCAUCAGAGUAGAAGGAGUA | 480 | 946 | 968 |
| AD-1420921 | CUGAUGAGUCACUGCAGUACC | 121 | GGUACUGCAGUGACUCAUCAGAG | 481 | 957 | 979 |
| AD-1420929 | UCACUGCAGUACCCAAAGACU | 122 | AGUCUUUGGGUACUGCAGUGACU | 482 | 965 | 987 |
| AD-1420936 | AGUACCCAAAGACUGUACGGG | 123 | CCCGUACAGUCUUUGGGUACUGC | 483 | 972 | 994 |
| AD-1420945 | AGACUGUACGGGUUCCAUAUC | 124 | GAUAUGGAACCCGUACAGUCUUU | 484 | 981 | 1003 |
| AD-1420954 | GGGUUCCAUAUCCAAAGGCAG | 125 | CUGCCUUUGGAUAUGGAACCCGU | 485 | 990 | 1012 |
| AD-1420974 | GGAGCUGUGAAUCCAACUGUA | 126 | UACAGUUGGAUUCACAGCUCCUG | 486 | 1010 | 1032 |
| AD-1420980 | GUGAAUCCAACUGUAAAGUUC | 127 | GAACUUUACAGUUGGAUUCACAG | 487 | 1016 | 1038 |
| AD-1420987 | CAACUGUAAAGUUCUUUGUUG | 128 | CAACAAAGAACUUUACAGUUGGA | 488 | 1023 | 1045 |
| AD-1420998 | UUCUUUGUUGUAAAUACAGAC | 129 | GUCUGUAUUUACAACAAAGAACU | 489 | 1034 | 1056 |
| AD-1421004 | GUUGUAAAUACAGACUCUCUC | 130 | GAGAGAGUCUGUAUUUACAACAA | 490 | 1040 | 1062 |
| AD-1421015 | AGACUCUCUCAGCUCAGUCAC | 131 | GUGACUGAGCUGAGAGAGUCUGU | 491 | 1051 | 1073 |
| AD-1421021 | UCUCAGCUCAGUCACCAAUGC | 132 | GCAUUGGUGACUGAGCUGAGAGA | 492 | 1057 | 1079 |
| AD-1421028 | UCAGUCACCAAUGCAACUUCC | 133 | GGAAGUUGCAUUGGUGACUGAGC | 493 | 1064 | 1086 |
| AD-1421035 | CCAAUGCAACUUCCAUACAAA | 134 | UUUGUAUGGAAGUUGCAUUGGUG | 494 | 1071 | 1093 |
| AD-1421041 | CAACUUCCAUACAAAUCACUG | 135 | CAGUGAUUUGUAUGGAAGUUGCA | 495 | 1077 | 1099 |
| AD-1421047 | CCAUACAAAUCACUGCUCCUG | 136 | CAGGAGCAGUGAUUUGUAUGGAA | 496 | 1083 | 1105 |
| AD-1421055 | AUCACUGCUCCUGCUUCUAUG | 137 | CAUAGAAGCAGGAGCAGUGAUUU | 497 | 1091 | 1113 |
| AD-1421063 | UCCUGCUUCUAUGUUGAUAGG | 138 | CCUAUCAACAUAGAAGCAGGAGC | 498 | 1099 | 1121 |
| AD-1421067 | GAUCACUACUUGUGUGAUGUG | 139 | CACAUCACACAAGUAGUGAUCCC | 499 | 1121 | 1143 |
| AD-1421073 | UACUUGUGUGAUGUGACAUGG | 140 | CCAUGUCACAUCACACAAGUAGU | 500 | 1127 | 1149 |
| AD-1421086 | UGACAUGGGCAACACAAGAAA | 141 | UUUCUUGUGUUGCCCAUGUCACA | 501 | 1140 | 1162 |
| AD-1421092 | GGGCAACACAAGAAAGAAUUU | 142 | AAAUUCUUUCUUGUGUUGCCCAU | 502 | 1146 | 1168 |
| AD-1421098 | CACAAGAAAGAAUUUCUUUGC | 143 | GCAAAGAAAUUCUUUCUUGUGUU | 503 | 1152 | 1174 |
| AD-1421104 | AAAGAAUUUCUUUGCAGUGGC | 144 | GCCACUGCAAAGAAAUUCUUUCU | 504 | 1158 | 1180 |
| AD-1421120 | GUGGCUCAGGAGGAUUCAGAA | 145 | UUCUGAAUCCUCCUGAGCCACUG | 505 | 1174 | 1196 |
| AD-1421126 | CAGGAGGAUUCAGAACUAUUC | 146 | GAAUAGUUCUGAAUCCUCCUGAG | 506 | 1180 | 1202 |
| AD-1421132 | GAUUCAGAACUAUUCGGUCAU | 147 | AUGACCGAAUAGUUCUGAAUCCU | 507 | 1186 | 1208 |
| AD-1421141 | CUAUUCGGUCAUGGAUAUUUG | 148 | CAAAUAUCCAUGACCGAAUAGUU | 508 | 1195 | 1217 |
| AD-1421147 | GGUCAUGGAUAUUUGUGACUA | 149 | UAGUCACAAAUAUCCAUGACCGA | 509 | 1201 | 1223 |
| AD-1421153 | GGAUAUUUGUGACUAUGAUGA | 150 | UCAUCAUAGUCACAAAUAUCCAU | 510 | 1207 | 1229 |
| AD-1421160 | UGUGACUAUGAUGAAUCCAGU | 151 | ACUGGAUUCAUCAUAGUCACAAA | 511 | 1214 | 1236 |
| AD-1421169 | GAUGAAUCCAGUGGAAGAUGG | 152 | CCAUCUUCCACUGGAUUCAUCAU | 512 | 1223 | 1245 |
| AD-1421177 | CAGUGGAAGAUGGAACUGCUU | 153 | AAGCAGUUCCAUCUUCCACUGGA | 513 | 1231 | 1253 |
| AD-1421183 | AAGAUGGAACUGCUUAGUGGC | 154 | GCCACUAAGCAGUUCCAUCUUCC | 514 | 1237 | 1259 |
| AD-1421191 | ACUGCUUAGUGGCACGGCAAC | 155 | GUUGCCGUGCCACUAAGCAGUUC | 515 | 1245 | 1267 |
| AD-1421197 | UAGUGGCACGGCAACACAUUG | 156 | CAAUGUGUUGCCGUGCCACUAAG | 516 | 1251 | 1273 |
| AD-1421206 | GGCAACACAUUGAAAUGAGUA | 157 | UACUCAUUUCAAUGUGUUGCCGU | 517 | 1260 | 1282 |
| AD-1421212 | ACAUUGAAAUGAGUACUACUG | 158 | CAGUAGUACUCAUUUCAAUGUGU | 518 | 1266 | 1288 |
| AD-1421222 | GAGUACUACUGGCUGGGUUGG | 159 | CCAACCCAGCCAGUAGUACUCAU | 519 | 1276 | 1298 |
| AD-1421231 | UGGCUGGGUUGGAAGAUUUAG | 160 | CUAAAUCUUCCAACCCAGCCAGU | 520 | 1285 | 1307 |
| AD-1421237 | GGUUGGAAGAUUUAGGCCUUC | 161 | GAAGGCCUAAAUCUUCCAACCCA | 521 | 1291 | 1313 |
| AD-1421245 | GAUUUAGGCCUUCAGAACCUC | 162 | GAGGUUCUGAAGGCCUAAAUCUU | 522 | 1299 | 1321 |
| AD-1421253 | CCUUCAGAACCUCAUUUUACC | 163 | GGUAAAAUGAGGUUCUGAAGGCC | 523 | 1307 | 1329 |
| AD-1421259 | GAACCUCAUUUUACCCUUGAU | 164 | AUCAAGGGUAAAAUGAGGUUCUG | 524 | 1313 | 1335 |
| AD-1421265 | CAUUUUACCCUUGAUGGUAAU | 165 | AUUACCAUCAAGGGUAAAAUGAG | 525 | 1319 | 1341 |
| AD-1421271 | ACCCUUGAUGGUAAUAGCUUC | 166 | GAAGCUAUUACCAUCAAGGGUAA | 526 | 1325 | 1347 |
| AD-1421278 | AUGGUAAUAGCUUCUACAAGA | 167 | UCUUGUAGAAGCUAUUACCAUCA | 527 | 1332 | 1354 |
| AD-1421285 | UAGCUUCUACAAGAUCAUCAG | 168 | CUGAUGAUCUUGUAGAAGCUAUU | 528 | 1339 | 1361 |
| AD-1421294 | CAAGAUCAUCAGCAAUGAAGA | 169 | UCUUCAUUGCUGAUGAUCUUGUA | 529 | 1348 | 1370 |
| AD-1421304 | AGCAAUGAAGAAGGUUACAGA | 170 | UCUGUAACCUUCUUCAUUGCUGA | 530 | 1358 | 1380 |
| AD-1421320 | ACAGACACAUUUGCUAUUUCC | 172 | GGAAAUAGCAAAUGUGUCUGUAA | 532 | 1374 | 1396 |
| AD-1421327 | CAUUUGCUAUUUCCAAAUAGA | 173 | UCUAUUUGGAAAUAGCAAAUGUG | 533 | 1381 | 1403 |
| AD-1421335 | GACUGCACAUUUAUUACAAAA | 174 | UUUUGUAAUAAAUGUGCAGUCUU | 534 | 1409 | 1431 |
| AD-1421341 | ACAUUUAUUACAAAAGGCACC | 175 | GGUGCCUUUUGUAAUAAAUGUGC | 535 | 1415 | 1437 |
| AD-1421348 | UUACAAAAGGCACCUGGGAAG | 176 | CUUCCCAGGUGCCUUUUGUAAUA | 536 | 1422 | 1444 |
| AD-1421356 | GGCACCUGGGAAGUCAUCGGG | 177 | CCCGAUGACUUCCCAGGUGCCUU | 537 | 1430 | 1452 |
| AD-1421362 | UGGGAAGUCAUCGGGAUAGAA | 178 | UUCUAUCCCGAUGACUUCCCAGG | 538 | 1436 | 1458 |
| AD-1421368 | GUCAUCGGGAUAGAAGCUCUA | 179 | UAGAGCUUCUAUCCCGAUGACUU | 539 | 1442 | 1464 |
| AD-1421375 | GGAUAGAAGCUCUAACCAGUG | 180 | CACUGGUUAGAGCUUCUAUCCCG | 540 | 1449 | 1471 |
| AD-1421383 | GCUCUAACCAGUGAUUAUCUA | 181 | UAGAUAAUCACUGGUUAGAGCUU | 541 | 1457 | 1479 |
| AD-1421389 | ACCAGUGAUUAUCUAUACUAC | 182 | GUAGUAUAGAUAAUCACUGGUUA | 542 | 1463 | 1485 |
| AD-1421394 | GAUUAUCUAUACUACAUUAGU | 183 | ACUAAUGUAGUAUAGAUAAUCAC | 543 | 1469 | 1491 |
| AD-1421408 | UAAUGAAUAUAAAGGAAUGCC | 184 | GGCAUUCCUUUAUAUUCAUUACU | 544 | 1489 | 1511 |
| AD-1421414 | AUAUAAAGGAAUGCCAGGAGG | 185 | CCUCCUGGCAUUCCUUUAUAUUC | 545 | 1495 | 1517 |
| AD-1421428 | CAGGAGGAAGGAAUCUUUAUA | 186 | UAUAAAGAUUCCUUCCUCCUGGC | 546 | 1509 | 1531 |
| AD-1421433 | GAAGGAAUCUUUAUAAAAUCC | 187 | GGAUUUUAUAAAGAUUCCUUCCU | 547 | 1515 | 1537 |
| AD-1421441 | UUAUAAAAUCCAACUUAGUGA | 188 | UCACUAAGUUGGAUUUUAUAAAG | 548 | 1525 | 1547 |
| AD-1421451 | CAACUUAGUGACUAUACAAAA | 189 | UUUUGUAUAGUCACUAAGUUGGA | 549 | 1535 | 1557 |
| AD-1421459 | UGACUAUACAAAAGUGACAUG | 190 | CAUGUCACUUUUGUAUAGUCACU | 550 | 1543 | 1565 |
| AD-1421468 | AAAAGUGACAUGCCUCAGUUG | 191 | CAACUGAGGCAUGUCACUUUUGU | 551 | 1552 | 1574 |
| AD-1421480 | CCUCAGUUGUGAGCUGAAUCC | 192 | GGAUUCAGCUCACAACUGAGGCA | 552 | 1564 | 1586 |
| AD-1421490 | GAGCUGAAUCCGGAAAGGUGU | 193 | ACACCUUUCCGGAUUCAGCUCAC | 553 | 1574 | 1596 |
| AD-1421499 | CCGGAAAGGUGUCAGUACUAU | 194 | AUAGUACUGACACCUUUCCGGAU | 554 | 1583 | 1605 |
| AD-1421505 | AGGUGUCAGUACUAUUCUGUG | 195 | CACAGAAUAGUACUGACACCUUU | 555 | 1589 | 1611 |
| AD-1421511 | CAGUACUAUUCUGUGUCAUUC | 196 | GAAUGACACAGAAUAGUACUGAC | 556 | 1595 | 1617 |
| AD-1421521 | CUGUGUCAUUCAGUAAAGAGG | 197 | CCUCUUUACUGAAUGACACAGAA | 557 | 1605 | 1627 |
| AD-1421530 | UCAGUAAAGAGGCGAAGUAUU | 198 | AAUACUUCGCCUCUUUACUGAAU | 558 | 1614 | 1636 |
| AD-1421538 | GAGGCGAAGUAUUAUCAGCUG | 199 | CAGCUGAUAAUACUUCGCCUCUU | 559 | 1622 | 1644 |
| AD-1421546 | GUAUUAUCAGCUGAGAUGUUC | 200 | GAACAUCUCAGCUGAUAAUACUU | 560 | 1630 | 1652 |
| AD-1421563 | CUCUAUACUCUACACAGCAGC | 201 | GCUGCUGUGUAGAGUAUAGAGGG | 561 | 1667 | 1689 |
| AD-1421570 | CUCUACACAGCAGCGUGAAUG | 202 | CAUUCACGCUGCUGUGUAGAGUA | 562 | 1674 | 1696 |
| AD-1421578 | AGCAGCGUGAAUGAUAAAGGG | 203 | CCCUUUAUCAUUCACGCUGCUGU | 563 | 1682 | 1704 |
| AD-1421587 | AAUGAUAAAGGGCUGAGAGUC | 204 | GACUCUCAGCCCUUUAUCAUUCA | 564 | 1691 | 1713 |
| AD-1421596 | GGGCUGAGAGUCCUGGAAGAC | 205 | GUCUUCCAGGACUCUCAGCCCUU | 565 | 1700 | 1722 |
| AD-1421604 | AGUCCUGGAAGACAAUUCAGC | 206 | GCUGAAUUGUCUUCCAGGACUCU | 566 | 1708 | 1730 |
| AD-1421612 | AAGACAAUUCAGCUUUGGAUA | 207 | UAUCCAAAGCUGAAUUGUCUUCC | 567 | 1716 | 1738 |
| AD-1421620 | UCAGCUUUGGAUAAAAUGCUG | 208 | CAGCAUUUUAUCCAAAGCUGAAU | 568 | 1724 | 1746 |
| AD-1421629 | GAUAAAAUGCUGCAGAAUGUC | 209 | GACAUUCUGCAGCAUUUUAUCCA | 569 | 1733 | 1755 |
| AD-1421635 | AUGCUGCAGAAUGUCCAGAUG | 210 | CAUCUGGACAUUCUGCAGCAUUU | 570 | 1739 | 1761 |
| AD-1421650 | CUGGACUUCAUUAUUUUGAAU | 211 | AUUCAAAAUAAUGAAGUCCAGUU | 571 | 1772 | 1794 |
| AD-1421662 | AAACAAAAUUUUGGUAUCAGA | 212 | UCUGAUACCAAAAUUUUGUUUCA | 572 | 1794 | 1816 |
| AD-1421672 | UUGGUAUCAGAUGAUCUUGCC | 213 | GGCAAGAUCAUCUGAUACCAAAA | 573 | 1804 | 1826 |
| AD-1421679 | CAGAUGAUCUUGCCUCCUCAU | 214 | AUGAGGAGGCAAGAUCAUCUGAU | 574 | 1811 | 1833 |
| AD-1421685 | AUCUUGCCUCCUCAUUUUGAU | 215 | AUCAAAAUGAGGAGGCAAGAUCA | 575 | 1817 | 1839 |
| AD-1421691 | CCUCCUCAUUUUGAUAAAUCC | 216 | GGAUUUAUCAAAAUGAGGAGGCA | 576 | 1823 | 1845 |
| AD-1421697 | CAUUUUGAUAAAUCCAAGAAA | 217 | UUUCUUGGAUUUAUCAAAAUGAG | 577 | 1829 | 1851 |
| AD-1421706 | AAAUCCAAGAAAUAUCCUCUA | 218 | UAGAGGAUAUUUCUUGGAUUUAU | 578 | 1838 | 1860 |
| AD-1421712 | AAGAAAUAUCCUCUACUAUUA | 219 | UAAUAGUAGAGGAUAUUUCUUGG | 579 | 1844 | 1866 |
| AD-1421722 | CUCUACUAUUAGAUGUGUAUG | 220 | CAUACACAUCUAAUAGUAGAGGA | 580 | 1854 | 1876 |
| AD-1421765 | AGACACUGUCUUCAGACUGAA | 221 | UUCAGUCUGAAGACAGUGUCUGC | 581 | 1897 | 1919 |
| AD-1421771 | UGUCUUCAGACUGAACUGGGC | 222 | GCCCAGUUCAGUCUGAAGACAGU | 582 | 1903 | 1925 |
| AD-1421778 | AGACUGAACUGGGCCACUUAC | 223 | GUAAGUGGCCCAGUUCAGUCUGA | 583 | 1910 | 1932 |
| AD-1421791 | CCACUUACCUUGCAAGCACAG | 224 | CUGUGCUUGCAAGGUAAGUGGCC | 584 | 1923 | 1945 |
| AD-1421800 | UUGCAAGCACAGAAAACAUUA | 225 | UAAUGUUUUCUGUGCUUGCAAGG | 585 | 1932 | 1954 |
| AD-1421807 | CACAGAAAACAUUAUAGUAGC | 226 | GCUACUAUAAUGUUUUCUGUGCU | 586 | 1939 | 1961 |
| AD-1421815 | ACAUUAUAGUAGCUAGCUUUG | 227 | CAAAGCUAGCUACUAUAAUGUUU | 587 | 1947 | 1969 |
| AD-1421823 | GUAGCUAGCUUUGAUGGCAGA | 228 | UCUGCCAUCAAAGCUAGCUACUA | 588 | 1955 | 1977 |
| AD-1421830 | GCUUUGAUGGCAGAGGAAGUG | 229 | CACUUCCUCUGCCAUCAAAGCUA | 589 | 1962 | 1984 |
| AD-1421839 | GCAGAGGAAGUGGUUACCAAG | 230 | CUUGGUAACCACUUCCUCUGCCA | 590 | 1971 | 1993 |
| AD-1421850 | GGUUACCAAGGAGAUAAGAUC | 231 | GAUCUUAUCUCCUUGGUAACCAC | 591 | 1982 | 2004 |
| AD-1421857 | AAGGAGAUAAGAUCAUGCAUG | 232 | CAUGCAUGAUCUUAUCUCCUUGG | 592 | 1989 | 2011 |
| AD-1421865 | AAGAUCAUGCAUGCAAUCAAC | 233 | GUUGAUUGCAUGCAUGAUCUUAU | 593 | 1997 | 2019 |
| AD-1421874 | CAUGCAAUCAACAGAAGACUG | 234 | CAGUCUUCUGUUGAUUGCAUGCA | 594 | 2006 | 2028 |
| AD-1421884 | ACAGAAGACUGGGAACAUUUG | 235 | CAAAUGUUCCCAGUCUUCUGUUG | 595 | 2016 | 2038 |
| AD-1421891 | ACUGGGAACAUUUGAAGUUGA | 236 | UCAACUUCAAAUGUUCCCAGUCU | 596 | 2023 | 2045 |
| AD-1421897 | AACAUUUGAAGUUGAAGAUCA | 237 | UGAUCUUCAACUUCAAAUGUUCC | 597 | 2029 | 2051 |
| AD-1421903 | UGAAGUUGAAGAUCAAAUUGA | 238 | UCAAUUUGAUCUUCAACUUCAAA | 598 | 2035 | 2057 |
| AD-1421909 | UGAAGAUCAAAUUGAAGCAGC | 239 | GCUGCUUCAAUUUGAUCUUCAAC | 599 | 2041 | 2063 |
| AD-1421917 | AAAUUGAAGCAGCCAGACAAU | 240 | AUUGUCUGGCUGCUUCAAUUUGA | 600 | 2049 | 2071 |
| AD-1421925 | GCAGCCAGACAAUUUUCAAAA | 241 | UUUUGAAAAUUGUCUGGCUGCUU | 601 | 2057 | 2079 |
| AD-1421948 | GGGAUUUGUGGACAACAAACG | 242 | CGUUUGUUGUCCACAAAUCCCAU | 602 | 2080 | 2102 |
| AD-1421954 | UGUGGACAACAAACGAAUUGC | 243 | GCAAUUCGUUUGUUGUCCACAAA | 603 | 2086 | 2108 |
| AD-1421961 | AACAAACGAAUUGCAAUUUGG | 244 | CCAAAUUGCAAUUCGUUUGUUGU | 604 | 2093 | 2115 |
| AD-1421968 | GGUCAUAUGGAGGGUACGUAA | 245 | UUACGUACCCUCCAUAUGACCAG | 605 | 2118 | 2140 |
| AD-1421979 | GGGUACGUAACCUCAAUGGUC | 246 | GACCAUUGAGGUUACGUACCCUC | 606 | 2129 | 2151 |
| AD-1422005 | AUCGGGAAGUGGCGUGUUCAA | 247 | UUGAACACGCCACUUCCCGAUCC | 607 | 2155 | 2177 |
| AD-1422014 | UGGCGUGUUCAAGUGUGGAAU | 248 | AUUCCACACUUGAACACGCCACU | 608 | 2164 | 2186 |
| AD-1422021 | UUCAAGUGUGGAAUAGCCGUG | 249 | CACGGCUAUUCCACACUUGAACA | 609 | 2171 | 2193 |
| AD-1422057 | UGGGAGUACUAUGACUCAGUG | 250 | CACUGAGUCAUAGUACUCCCACC | 610 | 2207 | 2229 |
| AD-1422067 | AUGACUCAGUGUACACAGAAC | 251 | GUUCUGUGUACACUGAGUCAUAG | 611 | 2217 | 2239 |
| AD-1422075 | GUGUACACAGAACGUUACAUG | 252 | CAUGUAACGUUCUGUGUACACUG | 612 | 2225 | 2247 |
| AD-1422081 | ACAGAACGUUACAUGGGUCUC | 253 | GAGACCCAUGUAACGUUCUGUGU | 613 | 2231 | 2253 |
| AD-1422088 | GUUACAUGGGUCUCCCAACUC | 254 | GAGUUGGGAGACCCAUGUAACGU | 614 | 2238 | 2260 |
| AD-1422096 | GGUCUCCCAACUCCAGAAGAC | 255 | GUCUUCUGGAGUUGGGAGACCCA | 615 | 2246 | 2268 |
| AD-1422103 | CAACUCCAGAAGACAACCUUG | 256 | CAAGGUUGUCUUCUGGAGUUGGG | 616 | 2253 | 2275 |
| AD-1422114 | GACAACCUUGACCAUUACAGA | 257 | UCUGUAAUGGUCAAGGUUGUCUU | 617 | 2264 | 2286 |
| AD-1422120 | CUUGACCAUUACAGAAAUUCA | 258 | UGAAUUUCUGUAAUGGUCAAGGU | 618 | 2270 | 2292 |
| AD-1422127 | AUUACAGAAAUUCAACAGUCA | 259 | UGACUGUUGAAUUUCUGUAAUGG | 619 | 2277 | 2299 |
| AD-1422133 | GAAAUUCAACAGUCAUGAGCA | 260 | UGCUCAUGACUGUUGAAUUUCUG | 620 | 2283 | 2305 |
| AD-1422145 | UCAUGAGCAGAGCUGAAAAUU | 261 | AAUUUUCAGCUCUGCUCAUGACU | 621 | 2295 | 2317 |
| AD-1422151 | GCAGAGCUGAAAAUUUUAAAC | 262 | GUUUAAAAUUUUCAGCUCUGCUC | 622 | 2301 | 2323 |
| AD-1422161 | UUUAAACAAGUUGAGUACCUC | 263 | GAGGUACUCAACUUGUUUAAAAU | 623 | 2315 | 2337 |
| AD-1422169 | AGUUGAGUACCUCCUUAUUCA | 264 | UGAAUAAGGAGGUACUCAACUUG | 624 | 2323 | 2345 |
| AD-1422176 | UACCUCCUUAUUCAUGGAACA | 265 | UGUUCCAUGAAUAAGGAGGUACU | 625 | 2330 | 2352 |
| AD-1422183 | UUAUUCAUGGAACAGCAGAUG | 266 | CAUCUGCUGUUCCAUGAAUAAGG | 626 | 2337 | 2359 |
| AD-1422192 | GAACAGCAGAUGAUAACGUUC | 267 | GAACGUUAUCAUCUGCUGUUCCA | 627 | 2346 | 2368 |
| AD-1422198 | CAGAUGAUAACGUUCACUUUC | 268 | GAAAGUGAACGUUAUCAUCUGCU | 628 | 2352 | 2374 |
| AD-1422205 | UAACGUUCACUUUCAGCAGUC | 269 | GACUGCUGAAAGUGAACGUUAUC | 629 | 2359 | 2381 |
| AD-1422211 | UCACUUUCAGCAGUCAGCUCA | 270 | UGAGCUGACUGCUGAAAGUGAAC | 630 | 2365 | 2387 |
| AD-1422220 | GCAGUCAGCUCAGAUCUCCAA | 271 | UUGGAGAUCUGAGCUGACUGCUG | 631 | 2374 | 2396 |
| AD-1422227 | GCUCAGAUCUCCAAAGCCCUG | 272 | CAGGGCUUUGGAGAUCUGAGCUG | 632 | 2381 | 2403 |
| AD-1422234 | UCUCCAAAGCCCUGGUCGAUG | 273 | CAUCGACCAGGGCUUUGGAGAUC | 633 | 2388 | 2410 |
| AD-1422242 | GCCCUGGUCGAUGUUGGAGUG | 274 | CACUCCAACAUCGACCAGGGCUU | 634 | 2396 | 2418 |
| AD-1422248 | GUCGAUGUUGGAGUGGAUUUC | 275 | GAAAUCCACUCCAACAUCGACCA | 635 | 2402 | 2424 |
| AD-1422259 | AGUGGAUUUCCAGGCAAUGUG | 276 | CACAUUGCCUGGAAAUCCACUCC | 636 | 2413 | 2435 |
| AD-1422267 | UCCAGGCAAUGUGGUAUACUG | 277 | CAGUAUACCACAUUGCCUGGAAA | 637 | 2421 | 2443 |
| AD-1422274 | AAUGUGGUAUACUGAUGAAGA | 278 | UCUUCAUCAGUAUACCACAUUGC | 638 | 2428 | 2450 |
| AD-1422280 | GUAUACUGAUGAAGACCAUGG | 279 | CCAUGGUCUUCAUCAGUAUACCA | 639 | 2434 | 2456 |
| AD-1422288 | AUGAAGACCAUGGAAUAGCUA | 280 | UAGCUAUUCCAUGGUCUUCAUCA | 640 | 2442 | 2464 |
| AD-1422295 | CCAUGGAAUAGCUAGCAGCAC | 281 | GUGCUGCUAGCUAUUCCAUGGUC | 641 | 2449 | 2471 |
| AD-1422302 | AUAGCUAGCAGCACAGCACAC | 282 | GUGUGCUGUGCUGCUAGCUAUUC | 642 | 2456 | 2478 |
| AD-1422310 | CAGCACAGCACACCAACAUAU | 283 | AUAUGUUGGUGUGCUGUGCUGCU | 643 | 2464 | 2486 |
| AD-1422316 | AGCACACCAACAUAUAUAUAC | 284 | GUAUAUAUAUGUUGGUGUGCUGU | 644 | 2470 | 2492 |
| AD-1422322 | CCAACAUAUAUAUACCCACAU | 285 | AUGUGGGUAUAUAUAUGUUGGUG | 645 | 2476 | 2498 |
| AD-1422334 | UACCCACAUGAGCCACUUCAU | 286 | AUGAAGUGGCUCAUGUGGGUAUA | 646 | 2488 | 2510 |
| AD-1422340 | CAUGAGCCACUUCAUAAAACA | 287 | UGUUUUAUGAAGUGGCUCAUGUG | 647 | 2494 | 2516 |
| AD-1422346 | CCACUUCAUAAAACAAUGUUU | 288 | AAACAUUGUUUUAUGAAGUGGCU | 648 | 2500 | 2522 |
| AD-1422357 | AACAAUGUUUCUCUUUACCUU | 289 | AAGGUAAAGAGAAACAUUGUUUU | 649 | 2511 | 2533 |
| AD-1422363 | GUUUCUCUUUACCUUAGCACC | 290 | GGUGCUAAGGUAAAGAGAAACAU | 650 | 2517 | 2539 |
| AD-1422370 | UUUACCUUAGCACCUCAAAAU | 291 | AUUUUGAGGUGCUAAGGUAAAGA | 651 | 2524 | 2546 |
| AD-1422376 | UUAGCACCUCAAAAUACCAUG | 292 | CAUGGUAUUUUGAGGUGCUAAGG | 652 | 2530 | 2552 |
| AD-1422383 | CUCAAAAUACCAUGCCAUUUA | 293 | UAAAUGGCAUGGUAUUUUGAGGU | 653 | 2537 | 2559 |
| AD-1422390 | UACCAUGCCAUUUAAAGCUUA | 294 | UAAGCUUUAAAUGGCAUGGUAUU | 654 | 2544 | 2566 |
| AD-1422412 | UUUUCAUUAUCUCAAAACUGC | 295 | GCAGUUUUGAGAUAAUGAAAACA | 655 | 2581 | 2603 |
| AD-1422421 | UCUCAAAACUGCACUGUCAAG | 296 | CUUGACAGUGCAGUUUUGAGAUA | 656 | 2590 | 2612 |
| AD-1422429 | CUGCACUGUCAAGAUGAUGAU | 297 | AUCAUCAUCUUGACAGUGCAGUU | 657 | 2598 | 2620 |
| AD-1422438 | CAAGAUGAUGAUGAUCUUUAA | 298 | UUAAAGAUCAUCAUCAUCUUGAC | 658 | 2607 | 2629 |
| AD-1422449 | GAUCUUUAAAAUACACACUCA | 299 | UGAGUGUGUAUUUUAAAGAUCAU | 659 | 2619 | 2641 |
| AD-1422457 | AAAUACACACUCAAAUCAAGA | 300 | UCUUGAUUUGAGUGUGUAUUUUA | 660 | 2627 | 2649 |
| AD-1422465 | ACUCAAAUCAAGAAACUUAAG | 301 | CUUAAGUUUCUUGAUUUGAGUGU | 661 | 2635 | 2657 |
| AD-1422471 | AUCAAGAAACUUAAGGUUACC | 302 | GGUAACCUUAAGUUUCUUGAUUU | 662 | 2641 | 2663 |
| AD-1422479 | ACUUAAGGUUACCUUUGUUCC | 303 | GGAACAAAGGUAACCUUAAGUUU | 663 | 2649 | 2671 |
| AD-1422489 | ACCUUUGUUCCCAAAUUUCAU | 304 | AUGAAAUUUGGGAACAAAGGUAA | 664 | 2659 | 2681 |
| AD-1422495 | GUUCCCAAAUUUCAUACCUAU | 305 | AUAGGUAUGAAAUUUGGGAACAA | 665 | 2665 | 2687 |
| AD-1422501 | AAAUUUCAUACCUAUCAUCUU | 306 | AAGAUGAUAGGUAUGAAAUUUGG | 666 | 2671 | 2693 |
| AD-1422508 | AUACCUAUCAUCUUAAGUAGG | 307 | CCUACUUAAGAUGAUAGGUAUGA | 667 | 2678 | 2700 |
| AD-1422516 | CAUCUUAAGUAGGGACUUCUG | 308 | CAGAAGUCCCUACUUAAGAUGAU | 668 | 2686 | 2708 |
| AD-1422526 | AGGGACUUCUGUCUUCACAAC | 309 | GUUGUGAAGACAGAAGUCCCUAC | 669 | 2696 | 2718 |
| AD-1422535 | UGUCUUCACAACAGAUUAUUA | 310 | UAAUAAUCUGUUGUGAAGACAGA | 670 | 2705 | 2727 |
| AD-1422542 | ACAACAGAUUAUUACCUUACA | 311 | UGUAAGGUAAUAAUCUGUUGUGA | 671 | 2712 | 2734 |
| AD-1422549 | AUUAUUACCUUACAGAAGUUU | 312 | AAACUUCUGUAAGGUAAUAAUCU | 672 | 2719 | 2741 |
| AD-1422555 | ACCUUACAGAAGUUUGAAUUA | 313 | UAAUUCAAACUUCUGUAAGGUAA | 673 | 2725 | 2747 |
| AD-1422562 | AGAAGUUUGAAUUAUCCGGUC | 314 | GACCGGAUAAUUCAAACUUCUGU | 674 | 2732 | 2754 |
| AD-1422568 | UUGAAUUAUCCGGUCGGGUUU | 315 | AAACCCGACCGGAUAAUUCAAAC | 675 | 2738 | 2760 |
| AD-1422575 | AUCCGGUCGGGUUUUAUUGUU | 316 | AACAAUAAAACCCGACCGGAUAA | 676 | 2745 | 2767 |
| AD-1422581 | UCGGGUUUUAUUGUUUAAAAU | 317 | AUUUUAAACAAUAAAACCCGACC | 677 | 2751 | 2773 |
| AD-1422586 | UUUAAAAUCAUUUCUGCAUCA | 318 | UGAUGCAGAAAUGAUUUUAAACA | 678 | 2764 | 2786 |
| AD-1422593 | UCAUUUCUGCAUCAGCUGCUG | 319 | CAGCAGCUGAUGCAGAAAUGAUU | 679 | 2771 | 2793 |
| AD-1422599 | CUGCAUCAGCUGCUGAAACAA | 320 | UUGUUUCAGCAGCUGAUGCAGAA | 680 | 2777 | 2799 |
| AD-1422605 | CAGCUGCUGAAACAACAAAUA | 321 | UAUUUGUUGUUUCAGCAGCUGAU | 681 | 2783 | 2805 |
| AD-1422614 | AAACAACAAAUAGGAAUUGUU | 322 | AACAAUUCCUAUUUGUUGUUUCA | 682 | 2792 | 2814 |
| AD-1422623 | AGGAAUUGUUUUUAUGGAGGC | 323 | GCCUCCAUAAAAACAAUUCCUAU | 683 | 2803 | 2825 |
| AD-1422630 | GUUUUUAUGGAGGCUUUGCAU | 324 | AUGCAAAGCCUCCAUAAAAACAA | 684 | 2810 | 2832 |
| AD-1422640 | AGGCUUUGCAUAGAUUCCCUG | 325 | CAGGGAAUCUAUGCAAAGCCUCC | 685 | 2820 | 2842 |
| AD-1422646 | UGCAUAGAUUCCCUGAGCAGG | 326 | CCUGCUCAGGGAAUCUAUGCAAA | 686 | 2826 | 2848 |
| AD-1422653 | AUUCCCUGAGCAGGAUUUUAA | 327 | UUAAAAUCCUGCUCAGGGAAUCU | 687 | 2833 | 2855 |
| AD-1422659 | UGAGCAGGAUUUUAAUCUUUU | 328 | AAAAGAUUAAAAUCCUGCUCAGG | 688 | 2839 | 2861 |
| AD-1422667 | UAAUCUUUUUCUAACUGGACU | 329 | AGUCCAGUUAGAAAAAGAUUAAA | 689 | 2851 | 2873 |
| AD-1422676 | UCUAACUGGACUGGUUCAAAU | 330 | AUUUGAACCAGUCCAGUUAGAAA | 690 | 2860 | 2882 |
| AD-1422683 | GGACUGGUUCAAAUGUUGUUC | 331 | GAACAACAUUUGAACCAGUCCAG | 691 | 2867 | 2889 |
| AD-1422693 | AAAUGUUGUUCUCUUCUUUAA | 332 | UUAAAGAAGAGAACAACAUUUGA | 692 | 2877 | 2899 |
| AD-1422701 | UUCUCUUCUUUAAAGGGAUGG | 333 | CCAUCCCUUUAAAGAAGAGAACA | 693 | 2885 | 2907 |
| AD-1422708 | CUUUAAAGGGAUGGCAAGAUG | 334 | CAUCUUGCCAUCCCUUUAAAGAA | 694 | 2892 | 2914 |
| AD-1422720 | GGCAAGAUGUGGGCAGUGAUG | 335 | CAUCACUGCCCACAUCUUGCCAU | 695 | 2904 | 2926 |
| AD-1422729 | UGGGCAGUGAUGUCACUAGGG | 336 | CCCUAGUGACAUCACUGCCCACA | 696 | 2913 | 2935 |
| AD-1422752 | GGGACAGGAUAAGAGGGAUUA | 337 | UAAUCCCUCUUAUCCUGUCCCUG | 697 | 2936 | 2958 |
| AD-1422758 | GGAUAAGAGGGAUUAGGGAGA | 338 | UCUCCCUAAUCCCUCUUAUCCUG | 698 | 2942 | 2964 |
| AD-1422765 | AGGGAUUAGGGAGAGAAGAUA | 339 | UAUCUUCUCUCCCUAAUCCCUCU | 699 | 2949 | 2971 |
| AD-1422771 | UAGGGAGAGAAGAUAGCAGGG | 340 | CCCUGCUAUCUUCUCUCCCUAAU | 700 | 2955 | 2977 |
| AD-1422797 | CUGGGAACCCAAGUCCAAGCA | 341 | UGCUUGGACUUGGGUUCCCAGCC | 701 | 2981 | 3003 |
| AD-1422803 | ACCCAAGUCCAAGCAUACCAA | 342 | UUGGUAUGCUUGGACUUGGGUUC | 702 | 2987 | 3009 |
| AD-1422809 | GUCCAAGCAUACCAACACGAG | 343 | CUCGUGUUGGUAUGCUUGGACUU | 703 | 2993 | 3015 |
| AD-1422821 | CAACACGAGCAGGCUACUGUC | 344 | GACAGUAGCCUGCUCGUGUUGGU | 704 | 3005 | 3027 |
| AD-1422827 | GAGCAGGCUACUGUCAGCUCC | 345 | GGAGCUGACAGUAGCCUGCUCGU | 705 | 3011 | 3033 |
| AD-1422831 | CGGAGAAGAGCUGUUCACAGC | 346 | GCUGUGAACAGCUCUUCUCCGAG | 706 | 3035 | 3057 |
| AD-1422838 | GAGCUGUUCACAGCCAGACUG | 347 | CAGUCUGGCUGUGAACAGCUCUU | 707 | 3042 | 3064 |
| AD-1422847 | ACAGCCAGACUGGCACAGUUU | 348 | AAACUGUGCCAGUCUGGCUGUGA | 708 | 3051 | 3073 |
| AD-1422857 | UGGCACAGUUUUCUGAGAAAG | 349 | CUUUCUCAGAAAACUGUGCCAGU | 709 | 3061 | 3083 |
| AD-1422863 | AGUUUUCUGAGAAAGACUAUU | 350 | AAUAGUCUUUCUCAGAAAACUGU | 710 | 3067 | 3089 |
| AD-1422869 | CUGAGAAAGACUAUUCAAACA | 351 | UGUUUGAAUAGUCUUUCUCAGAA | 711 | 3073 | 3095 |
| AD-1422875 | AAGACUAUUCAAACAGUCUCA | 352 | UGAGACUGUUUGAAUAGUCUUUC | 712 | 3079 | 3101 |
| AD-1422882 | UUCAAACAGUCUCAGGAAAUC | 353 | GAUUUCCUGAGACUGUUUGAAUA | 713 | 3086 | 3108 |
| AD-1422890 | GUCUCAGGAAAUCAAAUAUGC | 354 | GCAUAUUUGAUUUCCUGAGACUG | 714 | 3094 | 3116 |
| AD-1422896 | GGAAAUCAAAUAUGCAAAGCA | 355 | UGCUUUGCAUAUUUGAUUUCCUG | 715 | 3100 | 3122 |
| AD-1422902 | CAAAUAUGCAAAGCACUGACU | 356 | AGUCAGUGCUUUGCAUAUUUGAU | 716 | 3106 | 3128 |
| AD-1422908 | UGCAAAGCACUGACUUCUAAG | 357 | CUUAGAAGUCAGUGCUUUGCAUA | 717 | 3112 | 3134 |
| AD-1422914 | GCACUGACUUCUAAGUAAAAC | 358 | GUUUUACUUAGAAGUCAGUGCUU | 718 | 3118 | 3140 |
| AD-1422920 | ACUUCUAAGUAAAACCACAGC | 359 | GCUGUGGUUUUACUUAGAAGUCA | 719 | 3124 | 3146 |
| AD-1422928 | GUAAAACCACAGCAGUUGAAA | 360 | UUUCAACUGCUGUGGUUUUACUU | 720 | 3132 | 3154 |
| AD-1422934 | CCACAGCAGUUGAAAAGACUC | 361 | GAGUCUUUUCAACUGCUGUGGUU | 721 | 3138 | 3160 |
| AD-1422943 | UUGAAAAGACUCCAAAGAAAU | 362 | AUUUCUUUGGAGUCUUUUCAACU | 722 | 3147 | 3169 |
| AD-1422949 | AGACUCCAAAGAAAUGUAAGG | 363 | CCUUACAUUUCUUUGGAGUCUUU | 723 | 3153 | 3175 |
| AD-1422955 | AAAGAAAUGUAAGGGAAACUG | 364 | CAGUUUCCCUUACAUUUCUUUGG | 724 | 3160 | 3182 |
| AD-1422965 | AAGGGAAACUGCCAGCAACGC | 365 | GCGUUGCUGGCAGUUUCCCUUAC | 725 | 3170 | 3192 |
| AD-1422975 | GUGCCAGUUAUGGCUAUAGGU | 366 | ACCUAUAGCCAUAACUGGCACCU | 726 | 3201 | 3223 |
| AD-1422984 | AUGGCUAUAGGUGCUACAAAA | 367 | UUUUGUAGCACCUAUAGCCAUAA | 727 | 3210 | 3232 |
| AD-1423007 | ACAGCAAGGGUGAUGGGAAAG | 368 | CUUUCCCAUCACCCUUGCUGUGU | 728 | 3233 | 3255 |
| AD-1423014 | GGGUGAUGGGAAAGCAUUGUA | 369 | UACAAUGCUUUCCCAUCACCCUU | 729 | 3240 | 3262 |
| AD-1423020 | UGGGAAAGCAUUGUAAAUGUG | 370 | CACAUUUACAAUGCUUUCCCAUC | 730 | 3246 | 3268 |
| AD-1423026 | AGCAUUGUAAAUGUGCUUUUA | 371 | UAAAAGCACAUUUACAAUGCUUU | 731 | 3252 | 3274 |
| AD-1423035 | ACUGAUGUUCCUAGUGAAAGA | 372 | UCUUUCACUAGGAACAUCAGUAU | 732 | 3282 | 3304 |
| AD-1423041 | GUUCCUAGUGAAAGAGGCAGC | 373 | GCUGCCUCUUUCACUAGGAACAU | 733 | 3288 | 3310 |
| AD-1423048 | GUGAAAGAGGCAGCUUGAAAC | 374 | GUUUCAAGCUGCCUCUUUCACUA | 734 | 3295 | 3317 |
| AD-1423055 | AGGCAGCUUGAAACUGAGAUG | 375 | CAUCUCAGUUUCAAGCUGCCUCU | 735 | 3302 | 3324 |
| AD-1423065 | AAACUGAGAUGUGAACACAUC | 376 | GAUGUGUUCACAUCUCAGUUUCA | 736 | 3312 | 3334 |
| AD-1423071 | AGAUGUGAACACAUCAGCUUG | 377 | CAAGCUGAUGUGUUCACAUCUCA | 737 | 3318 | 3340 |
| AD-1423082 | CAUCAGCUUGCCCUGUUAAAA | 378 | UUUUAACAGGGCAAGCUGAUGUG | 738 | 3329 | 3351 |
| AD-1423088 | CUUGCCCUGUUAAAAGAUGAA | 379 | UUCAUCUUUUAACAGGGCAAGCU | 739 | 3335 | 3357 |
| AD-1423104 | GUAUCACAAAUCUUAACUUGA | 380 | UCAAGUUAAGAUUUGUGAUACAA | 740 | 3363 | 3385 |
| AD-1423111 | AAAUCUUAACUUGAAGGAGUC | 381 | GACUCCUUCAAGUUAAGAUUUGU | 741 | 3370 | 3392 |
| AD-1423118 | AACUUGAAGGAGUCCUUGCAU | 382 | AUGCAAGGACUCCUUCAAGUUAA | 742 | 3377 | 3399 |
| AD-1423124 | AAGGAGUCCUUGCAUCAAUUU | 383 | AAAUUGAUGCAAGGACUCCUUCA | 743 | 3383 | 3405 |
| AD-1423130 | UCCUUGCAUCAAUUUUUCUUA | 384 | UAAGAAAAAUUGAUGCAAGGACU | 744 | 3389 | 3411 |
| AD-1423138 | UUAUUUCAUUUCUUUGAGUGU | 385 | ACACUCAAAGAAAUGAAAUAAGA | 745 | 3407 | 3429 |
| AD-1423145 | AUUUCUUUGAGUGUCUUAAUU | 386 | AAUUAAGACACUCAAAGAAAUGA | 746 | 3414 | 3436 |
| AD-1423151 | UUGAGUGUCUUAAUUAAAAGA | 387 | UCUUUUAAUUAAGACACUCAAAG | 747 | 3420 | 3442 |
| AD-1423158 | GAAUAUUUUAACUUCCUUGGA | 388 | UCCAAGGAAGUUAAAAUAUUCUU | 748 | 3439 | 3461 |
| AD-1423164 | UUUAACUUCCUUGGACUCAUU | 389 | AAUGAGUCCAAGGAAGUUAAAAU | 749 | 3445 | 3467 |
| AD-1423170 | UUCCUUGGACUCAUUUUAAAA | 390 | UUUUAAAAUGAGUCCAAGGAAGU | 750 | 3451 | 3473 |
| AD-1423184 | UAUUAUUAUUCCCAUUCUACA | 391 | UGUAGAAUGGGAAUAAUAAUACA | 751 | 3498 | 3520 |
| AD-1423191 | AUUCCCAUUCUACAUACUAUG | 392 | CAUAGUAUGUAGAAUGGGAAUAA | 752 | 3505 | 3527 |
| AD-1423200 | CUACAUACUAUGGAAUUUCUC | 393 | GAGAAAUUCCAUAGUAUGUAGAA | 753 | 3514 | 3536 |
| AD-1423210 | UGGAAUUUCUCCCAGUCAUUU | 394 | AAAUGACUGGGAGAAAUUCCAUA | 754 | 3524 | 3546 |
| AD-1423220 | CCCAGUCAUUUAAUAAAUGUG | 395 | CACAUUUAUUAAAUGACUGGGAG | 755 | 3534 | 3556 |
| AD-1423226 | CAUUUAAUAAAUGUGCCUUCA | 396 | UGAAGGCACAUUUAUUAAAUGAC | 756 | 3540 | 3562 |

TABLE 3
Modified Sense and Antisense Strand DPP4 dsRNA Sequences

| | | | | | mRNA Target | |
|---|---|---|---|---|---|---|
| Duplex | Sense Sequence | SEQ ID | Antisense | SEQ ID | Sequence | SEQ ID |
| Name | 5′ to 3′ | NO: | Sequence | NO: | 5′ to 3′ | NO: |
| AD- | gscsgcucAf | 757 | asAfsguuAf | 1117 | CGGCGCTCAC | 1477 |
| 1420199 | cUfAfAfugu | | aAfCfauuaG | | TAATGTTTAA | |
| | uuaacuuL96 | | fuGfagcgcs | | CTC | |
| | | | csg | | | |
| AD- | csusugccAf | 758 | asAfsgucAf | 1118 | AACTTGCCAG | 1478 |
| 1420212 | gCfGfGfcga | | cUfCfgccgC | | CGGCGAGTGA | |
| | gugacuuL96 | | fuGfgcaags | | CTC | |
| | | | usu | | | |
| AD- | ususcugcCf | 759 | asGfsagaAf | 1119 | ACTTCTGCCT | 1479 |
| 1420250 | uGfCfGfcuc | | gGfAfgcgcA | | GCGCTCCTTC | |
| | cuucucuL96 | | fgGfcagaas | | TCT | |
| | | | gsu | | | |
| AD- | gscsgcucCf | 760 | asAfsgcgUf | 1120 | CTGCGCTCCT | 1480 |
| 1420258 | uUfCfUfcug | | uCfAfgagaA | | TCTCTGAACG | |
| | aacgcuuL96 | | fgGfagcgcs | | CTC | |
| | | | asg | | | |
| AD- | csusucucUf | 761 | asGfsaagUf | 1121 | TCCTTCTCTG | 1481 |
| 1420264 | gAfAfCfgcu | | gAfGfcguuC | | AACGCTCACT | |
| | cacuucuL96 | | faGfagaags | | TCC | |
| | | | gsa | | | |
| AD- | ascsgcucAf | 762 | asGfsucuCf | 1122 | GAACGCTCAC | 1482 |
| 1420273 | cUfUfCfcga | | cUfCfggaaG | | TTCCGAGGAG | |
| | ggagacuL96 | | fuGfagcgus | | ACG | |
| | | | usc | | | |
| AD- | uscscgagGf | 763 | asAfsucgUf | 1123 | CTTCCGAGGA | 1483 |
| 1420282 | aGfAfCfgcc | | cGfGfcgucU | | GACGCCGACG | |
| | gacgauuL96 | | fcCfucggas | | ATG | |
| | | | asg | | | |
| AD- | gscscgacGf | 764 | asAfscggUf | 1124 | ACGCCGACGA | 1484 |
| 1420293 | aUfGfAfaga | | gUfCfuucaU | | TGAAGACACC | |
| | caccguuL96 | | fcGfucggcs | | GTG | |
| | | | gsu | | | |
| AD- | asusgaagAf | 765 | asAfsccuUf | 1125 | CGATGAAGAC | 1485 |
| 1420300 | cAfCfCfgug | | cCfAfcgguG | | ACCGTGGAAG | |
| | gaagguuL96 | | fuCfuucaus | | GTT | |
| | | | csg | | | |
| AD- | ascsaccgUf | 766 | asAfsgaaGf | 1126 | AGACACCGTG | 1486 |
| 1420306 | gGfAfAfggu | | aAfCfcuucC | | GAAGGTTCTT | |
| | ucuucuuL96 | | faCfggugus | | CTG | |
| | | | csu | | | |
| AD- | usgsgaagGf | 767 | asAfsgucCf | 1127 | CGTGGAAGGT | 1487 |
| 1420312 | uUfCfUfucu | | cAfGfaagaA | | TCTTCTGGGA | |
| | gggacuuL96 | | fcCfuuccas | | CTG | |
| | | | csg | | | |
| AD- | usgscugcUf | 768 | asUfsgguGf | 1128 | GGTGCTGCTG | 1488 |
| 1420338 | gCfGfCfuug | | aCfAfagcgC | | CGCTTGTCAC | |
| | ucaccauL96 | | faGfcagcas | | CAT | |
| | | | cSC | | | |
| AD- | usgscgcuUf | 769 | asUfsgauGf | 1129 | GCTGCGCTTG | 1489 |
| 1420344 | gUfCfAfcca | | aUfGfgugaC | | TCACCATCAT | |
| | ucaucauL96 | | faAfgcgcas | | CAC | |
| | | | gsc | | | |
| AD- | csgsugccCf | 770 | asUfscagCf | 1130 | ACCGTGCCCG | 1490 |
| 1420365 | gUfGfGfuuc | | aGfAfaccaC | | TGGTTCTGCT | |
| | ugcugauL96 | | fgGfgcacgs | | GAA | |
| | | | gsu | | | |
| AD- | csgsugguUf | 771 | asCfsuuuGf | 1131 | CCCGTGGTTC | 1491 |
| 1420371 | cUfGfCfuga | | uUfCfagcaG | | TGCTGAACAA | |
| | acaaaguL96 | | faAfccacgs | | AGG | |
| | | | gsg | | | |
| AD- | usgscugaAf | 772 | asAfsucuGf | 1132 | TCTGCTGAAC | 1492 |
| 1420379 | cAfAfAfggc | | uGfCfcuuuG | | AAAGGCACAG | |
| | acagauuL96 | | fuUfcagcas | | ATG | |
| | | | gsa | | | |
| AD- | ascsaaagGf | 773 | asAfsgcaUf | 1133 | GAACAAAGGC | 1493 |
| 1420385 | cAfCfAfgau | | cAfUfcuguG | | ACAGATGATG | |
| | gaugcuuL96 | | fcCfuuugus | | CTA | |
| | | | usc | | | |
| AD- | gscsacagAf | 774 | asAfsgcuGf | 1134 | AGGCACAGAT | 1494 |
| 1420391 | uGfAfUfgcu | | uAfGfcaucA | | GATGCTACAG | |
| | acagcuuL96 | | fuCfugugcs | | CTG | |
| | | | csu | | | |
| AD- | gsasugcuAf | 775 | asCfsgacUf | 1135 | ATGATGCTAC | 1495 |
| 1420399 | cAfGfCfuga | | gUfCfagcuG | | AGCTGACAGT | |
| | cagucguL96 | | fuAfgcaucs | | CGC | |
| | | | asu | | | |
| AD- | csasgcugAf | 776 | asAfsguuUf | 1136 | TACAGCTGAC | 1496 |
| 1420406 | cAfGfUfcgc | | uGfCfgacuG | | AGTCGCAAAA | |
| | aaaacuuL96 | | fuCfagcugs | | CTT | |
| | | | usa | | | |
| AD- | ascsagucGf | 777 | asAfsgugUf | 1137 | TGACAGTCGC | 1497 |
| 1420412 | cAfAfAfacu | | aAfGfuuuuG | | AAAACTTACA | |
| | uacacuuL96 | | fcGfacugus | | CTC | |
| | | | csa | | | |
| AD- | asascuuaCf | 778 | asAfsaucAf | 1138 | AAAACTTACA | 1498 |
| 1420422 | aCfUfCfuaa | | gUfUfagagU | | CTCTAACTGA | |
| | cugauuuL96 | | fgUfaaguus | | TTA | |
| | | | usu | | | |
| AD- | csascucuAf | 779 | asUfsuaaGf | 1139 | TACACTCTAA | 1499 |
| 1420428 | aCfUfGfauu | | uAfAfucagU | | CTGATTACTT | |
| | acuuaauL96 | | fuAfgagugs | | AAA | |
| | | | usa | | | |
| AD- | ususauagAf | 780 | asAfsguaUf | 1140 | ACTTATAGAC | 1500 |
| 1420437 | cUfGfAfagu | | aAfCfuucaG | | TGAAGTTATA | |
| | uauacuuL96 | | fuCfuauaas | | CTC | |
| | | | gsu | | | |
| AD- | gsasaguuAf | 781 | asAfsucuUf | 1141 | CTGAAGTTAT | 1501 |
| 1420446 | uAfCfUfccu | | aAfGfgaguA | | ACTCCTTAAG | |
| | uaagauuL96 | | fuAfacuucs | | ATG | |
| | | | asg | | | |
| AD- | csusccuuAf | 782 | asCfsugaAf | 1142 | TACTCCTTAA | 1502 |
| 1420455 | aGfAfUfgga | | aUfCfcaucU | | GATGGATTTC | |
| | uuucaguL96 | | fuAfaggags | | AGA | |
| | | | usa | | | |
| AD- | asgsauggAf | 783 | asUfscauGf | 1143 | TAAGATGGAT | 1503 |
| 1420462 | uUfUfCfaga | | aUfCfugaaA | | TTCAGATCAT | |
| | ucaugauL96 | | fuCfcaucus | | GAA | |
| | | | usa | | | |
| AD- | asusuucaGf | 784 | asAfsgauAf | 1144 | GGATTTCAGA | 1504 |
| 1420468 | aUfCfAfuga | | uUfCfaugaU | | TCATGAATAT | |
| | auaucuuL96 | | fcUfgaaaus | | CTC | |
| | | | CSC | | | |
| AD- | asuscaugAf | 785 | asUfsuugUf | 1145 | AGATCATGAA | 1505 |
| 1420475 | aUfAfUfcuc | | aGfAfgauaU | | TATCTCTACA | |
| | uacaaauL96 | | fuCfaugaus | | AAC | |
| | | | csu | | | |
| AD- | asusaucuCf | 786 | asUfsuucUf | 1146 | GAATATCTCT | 1506 |
| 1420482 | uAfCfAfaac | | uGfUfuuguA | | ACAAACAAGA | |
| | aagaaauL96 | | fgAfgauaus | | AAA | |
| | | | usc | | | |
| AD- | asuscuugGf | 787 | asUfscagCf | 1147 | ATATCTTGGT | 1507 |
| 1420499 | uAfUfUfcaa | | aUfUfgaauA | | ATTCAATGCT | |
| | ugcugauL96 | | fcCfaagaus | | GAA | |
| | | | asu | | | |
| AD- | gsusauucAf | 788 | asCfscauAf | 1148 | TGGTATTCAA | 1508 |
| 1420505 | aUfGfCfuga | | uUfCfagcaU | | TGCTGAATAT | |
| | auaugguL96 | | fuGfaauacs | | GGA | |
| | | | csa | | | |
| AD- | asasugcuGf | 789 | asCfsuguUf | 1149 | TCAATGCTGA | 1509 |
| 1420511 | aAfUfAfugg | | uCfCfauauU | | ATATGGAAAC | |
| | aaacaguL96 | | fcAfgcauus | | AGC | |
| | | | gsa | | | |
| AD- | asasuaugGf | 790 | asAfsacuGf | 1150 | TGAATATGGA | 1510 |
| 1420518 | aAfAfCfagc | | aGfCfuguuU | | AACAGCTCAG | |
| | ucaguuuL96 | | fcCfauauus | | TTT | |
| | | | csa | | | |
| AD- | gsasaacaGf | 791 | asCfsaagAf | 1151 | TGGAAACAGC | 1511 |
| 1420524 | cUfCfAfguu | | aAfAfcugaG | | TCAGTTTTCT | |
| | uucuuguL96 | | fcUfguuucs | | TGG | |
| | | | csa | | | |
| AD- | asgsuuuuCf | 792 | asUfsacuGf | 1152 | TCAGTTTTCT | 1512 |
| 1420534 | uUfGfGfaga | | uUfCfuccaA | | TGGAGAACAG | |
| | acaguauL96 | | fgAfaaacus | | TAC | |
| | | | gsa | | | |
| AD- | gsgsagaaCf | 793 | asCfsaucAf | 1153 | TTGGAGAACA | 1513 |
| 1420543 | aGfUfAfcau | | aAfUfguacU | | GTACATTTGA | |
| | uugauguL96 | | fgUfucuccs | | TGA | |
| | | | asa | | | |
| AD- | csasguacAf | 794 | asCfsaaaCf | 1154 | AACAGTACAT | 1514 |
| 1420549 | uUfUfGfaug | | uCfAfucaaA | | TTGATGAGTT | |
| | aguuuguL96 | | fuGfuacugs | | TGG | |
| | | | usu | | | |
| AD- | ususgaugAf | 795 | asAfsgaaUf | 1155 | ATTTGATGAG | 1515 |
| 1420557 | gUfUfUfgga | | gUfCfcaaaC | | TTTGGACATT | |
| | cauucuuL96 | | fuCfaucaas | | CTA | |
| | | | asu | | | |
| AD- | asgsuuugGf | 796 | asAfsuugAf | 1156 | TGAGTTTGGA | 1516 |
| 1420563 | aCfAfUfucu | | uAfGfaaugU | | CATTCTATCA | |
| | aucaauuL96 | | fcCfaaacus | | ATG | |
| | | | csa | | | |
| AD- | gsascauuCf | 797 | asAfsuaaUf | 1157 | TGGACATTCT | 1517 |
| 1420569 | uAfUfCfaau | | cAfUfugauA | | ATCAATGATT | |
| | gauuauuL96 | | fgAfaugucs | | ATT | |
| | | | csa | | | |
| AD- | asusgauuAf | 798 | asAfsggaGf | 1158 | CAATGATTAT | 1518 |
| 1420576 | uUfCfAfaua | | aUfAfuugaA | | TCAATATCTC | |
| | ucuccuuL96 | | fuAfaucaus | | CTG | |
| | | | usg | | | |
| AD- | cscsugauGf | 799 | asAfsgaaUf | 1159 | CTCCTGATGG | 1519 |
| 1420593 | gGfCfAfguu | | aAfAfcugcC | | GCAGTTTATT | |
| | uauucuuL96 | | fcAfucaggs | | CTC | |
| | | | asg | | | |
| AD- | gscsaguuUf | 800 | asAfsuucUf | 1160 | GGGCAGTTTA | 1520 |
| 1420601 | aUfUfCfucu | | aAfGfagaaU | | TTCTCTTAGA | |
| | uagaauuL96 | | faAfacugcs | | ATA | |
| | | | cSC | | | |
| AD- | csuscuuaGf | 801 | asAfscguAf | 1161 | TTCTCTTAGA | 1521 |
| 1420611 | aAfUfAfcaa | | gUfUfguauU | | ATACAACTAC | |
| | cuacguuL96 | | fcUfaagags | | GTG | |
| | | | asa | | | |
| AD- | asusacaaCf | 802 | asAfsuugCf | 1162 | GAATACAACT | 1522 |
| 1420619 | uAfCfGfuga | | uUfCfacguA | | ACGTGAAGCA | |
| | agcaauuL96 | | fgUfuguaus | | ATG | |
| | | | usc | | | |
| AD- | csgsugaaGf | 803 | asAfsaugCf | 1163 | TACGTGAAGC | 1523 |
| 1420628 | cAfAfUfgga | | cUfCfcauuG | | AATGGAGGCA | |
| | ggcauuuL96 | | fcUfucacgs | | TTC | |
| | | | usa | | | |
| AD- | gsasggcaUf | 804 | asAfsagcUf | 1164 | TGGAGGCATT | 1524 |
| 1420640 | uCfCfUfaca | | gUfGfuaggA | | CCTACACAGC | |
| | cagcuuuL96 | | faUfgccucs | | TTC | |
| | | | csa | | | |
| AD- | ususccuaCf | 805 | asCfsauaUf | 1165 | CATTCCTACA | 1525 |
| 1420646 | aCfAfGfcuu | | gAfAfgcugU | | CAGCTTCATA | |
| | cauauguL96 | | fgUfaggaas | | TGA | |
| | | | usg | | | |
| AD- | csascagcUf | 806 | asAfsaauGf | 1166 | TACACAGCTT | 1526 |
| 1420652 | uCfAfUfaug | | uCfAfuaugA | | CATATGACAT | |
| | acauuuuL96 | | faGfcugugs | | TTA | |
| | | | usa | | | |
| AD- | ususcauaUf | 807 | asAfsaucAf | 1167 | GCTTCATATG | 1527 |
| 1420658 | gAfCfAfuuu | | uAfAfauguC | | ACATTTATGA | |
| | augauuuL96 | | faUfaugaas | | TTT | |
| | | | gsc | | | |
| AD- | usgsauuuAf | 808 | asGfscugCf | 1168 | TATGATTTAA | 1528 |
| 1420662 | aAfUfAfaaa | | cUfUfuuauU | | ATAAAAGGCA | |
| | ggcagcuL96 | | fuAfaaucas | | GCT | |
| | | | usa | | | |
| AD- | asasauaaAf | 809 | asUfsaauCf | 1169 | TTAAATAAAA | 1529 |
| 1420668 | aGfGfCfagc | | aGfCfugccU | | GGCAGCTGAT | |
| | ugauuauL96 | | fuUfuauuus | | TAC | |
| | | | asa | | | |
| AD- | asgsgcagCf | 810 | asUfscuuCf | 1170 | AAAGGCAGCT | 1530 |
| 1420675 | uGfAfUfuac | | uGfUfaaucA | | GATTACAGAA | |
| | agaagauL96 | | fgCfugccus | | GAG | |
| | | | usu | | | |
| AD- | usgsauuaCf | 811 | asAfsaucCf | 1171 | GCTGATTACA | 1531 |
| 1420682 | aGfAfAfgag | | uCfUfcuucU | | GAAGAGAGGA | |
| | aggauuuL96 | | fgUfaaucas | | TTC | |
| | | | gSc | | | |
| AD- | asasgagaGf | 812 | asGfsuugUf | 1172 | AGAAGAGAGG | 1532 |
| 1420691 | gAfUfUfcca | | uUfGfgaauC | | ATTCCAAACA | |
| | aacaacuL96 | | fcUfcucuus | | ACA | |
| | | | csu | | | |
| AD- | gsasuuccAf | 813 | asAfscugUf | 1173 | AGGATTCCAA | 1533 |
| 1420698 | aAfCfAfaca | | gUfGfuuguU | | ACAACACACA | |
| | cacaguuL96 | | fuGfgaaucs | | GTG | |
| | | | csu | | | |
| AD- | csasacacAf | 814 | asAfsuguGf | 1174 | AACAACACAC | 1534 |
| 1420707 | cAfGfUfggg | | aCfCfcacuG | | AGTGGGTCAC | |
| | ucacauuL96 | | fuGfuguugs | | ATG | |
| | | | usu | | | |
| AD- | usgsggucAf | 815 | asAfscugGf | 1175 | AGTGGGTCAC | 1535 |
| 1420717 | cAfUfGfguc | | uGfAfccauG | | ATGGTCACCA | |
| | accaguuL96 | | fuGfacccas | | GTG | |
| | | | csu | | | |
| AD- | asusggucAf | 816 | asUfsaugAf | 1176 | ACATGGTCAC | 1536 |
| 1420725 | cCfAfGfugg | | cCfCfacugG | | CAGTGGGTCA | |
| | gucauauL96 | | fuGfaccaus | | TAA | |
| | | | gsu | | | |
| AD- | asgsugggUf | 817 | asAfsugcCf | 1177 | CCAGTGGGTC | 1537 |
| 1420734 | cAfUfAfaau | | aAfUfuuauG | | ATAAATTGGC | |
| | uggcauuL96 | | faCfccacus | | ATA | |
| | | | gsg | | | |
| AD- | csasuaaaUf | 818 | asCfsaaaCf | 1178 | GTCATAAATT | 1538 |
| 1420741 | uGfGfCfaua | | aUfAfugccA | | GGCATATGTT | |
| | uguuuguL96 | | faUfuuaugs | | TGG | |
| | | | aSC | | | |
| AD- | gsgscauaUf | 819 | asCfsauuGf | 1179 | TTGGCATATG | 1539 |
| 1420749 | gUfUfUfgga | | uUfCfcaaaC | | TTTGGAACAA | |
| | acaauguL96 | | faUfaugccs | | TGA | |
| | | | asa | | | |
| AD- | usgsgaacAf | 820 | asAfscauAf | 1180 | TTTGGAACAA | 1540 |
| 1420759 | aUfGfAfcau | | aAfUfgucaU | | TGACATTTAT | |
| | uuauguuL96 | | fuGfuuccas | | GTT | |
| | | | asa | | | |
| AD- | ususgaacCf | 821 | asAfscuuGf | 1181 | AATTGAACCA | 1541 |
| 1420773 | aAfAfUfuua | | gUfAfaauuU | | AATTTACCAA | |
| | ccaaguuL96 | | fgGfuucaas | | GTT | |
| | | | usu | | | |
| AD- | csasaauuUf | 822 | asUfscugUf | 1182 | ACCAAATTTA | 1542 |
| 1420779 | aCfCfAfagu | | aAfCfuuggU | | CCAAGTTACA | |
| | uacagauL96 | | faAfauuugs | | GAA | |
| | | | gsu | | | |
| AD- | ascscaagUf | 823 | asAfsuguGf | 1183 | TTACCAAGTT | 1543 |
| 1420786 | uAfCfAfgaa | | aUfUfcuguA | | ACAGAATCAC | |
| | ucacauuL96 | | faCfuuggus | | ATG | |
| | | | asa | | | |
| AD- | ususacagAf | 824 | asCfscguCf | 1184 | AGTTACAGAA | 1544 |
| 1420792 | aUfCfAfcau | | cAfUfgugaU | | TCACATGGAC | |
| | ggacgguL96 | | fuCfuguaas | | GGG | |
| | | | csu | | | |
| AD- | usasuaauGf | 825 | asCfsaguCf | 1185 | TATATAATGG | 1545 |
| 1420797 | gAfAfUfaac | | aGfUfuauuC | | AATAACTGAC | |
| | ugacuguL96 | | fcAfuuauas | | TGG | |
| | | | usa | | | |
| AD- | gsasauaaCf | 826 | asAfsuaaAf | 1186 | TGGAATAACT | 1546 |
| 1420804 | uGfAfCfugg | | cCfCfagucA | | GACTGGGTTT | |
| | guuuauuL96 | | fgUfuauucs | | ATG | |
| | | | csa | | | |
| AD- | gsascuggGf | 827 | asUfsccuCf | 1187 | CTGACTGGGT | 1547 |
| 1420812 | uUfUfAfuga | | uUfCfauaaA | | TTATGAAGAG | |
| | agaggauL96 | | fcCfcagucs | | GAA | |
| | | | asg | | | |
| AD- | gsusuuauGf | 828 | asAfsagaCf | 1188 | GGGTTTATGA | 1548 |
| 1420818 | aAfGfAfgga | | uUfCfcucuU | | AGAGGAAGTC | |
| | agucuuuL96 | | fcAfuaaacs | | TTC | |
| | | | cSC | | | |
| AD- | gsasagagGf | 829 | asGfscacUf | 1189 | ATGAAGAGGA | 1549 |
| 1420824 | aAfGfUfcuu | | gAfAfgacuU | | AGTCTTCAGT | |
| | cagugcuL96 | | fcCfucuucs | | GCC | |
| | | | asu | | | |
| AD- | asasgucuUf | 830 | asAfsgagUf | 1190 | GGAAGTCTTC | 1550 |
| 1420831 | cAfGfUfgcc | | aGfGfcacuG | | AGTGCCTACT | |
| | uacucuuL96 | | faAfgacuus | | CTG | |
| | | | CSC | | | |
| AD- | usgsccuaCf | 831 | asAfsccaCf | 1191 | AGTGCCTACT | 1551 |
| 1420841 | uCfUfGfcuc | | aGfAfgcagA | | CTGCTCTGTG | |
| | ugugguuL96 | | fgUfaggcas | | GTG | |
| | | | csu | | | |
| AD- | uscsugugGf | 832 | asCfsguuUf | 1192 | GCTCTGTGGT | 1552 |
| 1420853 | uGfGfUfcuc | | gGfAfgaccA | | GGTCTCCAAA | |
| | caaacguL96 | | fcCfacagas | | CGG | |
| | | | gSC | | | |
| AD- | gsgsucucCf | 833 | asAfsaaaGf | 1193 | GTGGTCTCCA | 1553 |
| 1420861 | aAfAfCfggc | | uGfCfcguuU | | AACGGCACTT | |
| | acuuuuuL96 | | fgGfagaccs | | TTT | |
| | | | aSC | | | |
| AD- | usasgcauAf | 834 | asGfsuuaAf | 1194 | TTTAGCATAT | 1554 |
| 1420864 | uGfCfCfcaa | | aUfUfgggcA | | GCCCAATTTA | |
| | uuuaacuL96 | | fuAfugcuas | | ACG | |
| | | | asa | | | |
| AD- | usgscccaAf | 835 | asCfsuguGf | 1195 | TATGCCCAAT | 1555 |
| 1420871 | uUfUfAfacg | | uCfGfuuaaA | | TTAACGACAC | |
| | acacaguL96 | | fuUfgggcas | | AGA | |
| | | | usa | | | |
| AD- | ususuaacGf | 836 | asGfsggaCf | 1196 | AATTTAACGA | 1556 |
| 1420878 | aCfAfCfaga | | uUfCfugugU | | CACAGAAGTC | |
| | agucccuL96 | | fcGfuuaaas | | CCA | |
| | | | usu | | | |
| AD- | ascsagaaGf | 837 | asUfscaaUf | 1197 | ACACAGAAGT | 1557 |
| 1420887 | uCfCfCfacu | | aAfGfugggA | | CCCACTTATT | |
| | uauugauL96 | | fcUfucugus | | GAA | |
| | | | gsu | | | |
| AD- | gsuscccaCf | 838 | asGfsaguAf | 1198 | AAGTCCCACT | 1558 |
| 1420893 | uUfAfUfuga | | uUfCfaauaA | | TATTGAATAC | |
| | auacucuL96 | | fgUfgggacs | | TCC | |
| | | | usu | | | |
| AD- | usasuugaAf | 839 | asAfsguaGf | 1199 | CTTATTGAAT | 1559 |
| 1420901 | uAfCfUfccu | | aAfGfgaguA | | ACTCCTTCTA | |
| | ucuacuuL96 | | fuUfcaauas | | CTC | |
| | | | asg | | | |
| AD- | csusccuuCf | 840 | asAfscucAf | 1200 | TACTCCTTCT | 1560 |
| 1420910 | uAfCfUfcug | | uCfAfgaguA | | ACTCTGATGA | |
| | augaguuL96 | | fgAfaggags | | GTC | |
| | | | usa | | | |
| AD- | csusgaugAf | 841 | asGfsuacUf | 1201 | CTCTGATGAG | 1561 |
| 1420921 | gUfCfAfcug | | gCfAfgugaC | | TCACTGCAGT | |
| | caguacuL96 | | fuCfaucags | | ACC | |
| | | | asg | | | |
| AD- | uscsacugCf | 842 | asGfsucuUf | 1202 | AGTCACTGCA | 1562 |
| 1420929 | aGfUfAfccc | | uGfGfguacU | | GTACCCAAAG | |
| | aaagacuL96 | | fgCfagugas | | ACT | |
| | | | csu | | | |
| AD- | asgsuaccCf | 843 | asCfscguAf | 1203 | GCAGTACCCA | 1563 |
| 1420936 | aAfAfGfacu | | cAfGfucuuU | | AAGACTGTAC | |
| | guacgguL96 | | fgGfguacus | | GGG | |
| | | | gsc | | | |
| AD- | asgsacugUf | 844 | asAfsuauGf | 1204 | AAAGACTGTA | 1564 |
| 1420945 | aCfGfGfguu | | gAfAfcccgU | | CGGGTTCCAT | |
| | ccauauuL96 | | faCfagucus | | ATC | |
| | | | usu | | | |
| AD- | gsgsguucCf | 845 | asUfsgccUf | 1205 | ACGGGTTCCA | 1565 |
| 1420954 | aUfAfUfcca | | uUfGfgauaU | | TATCCAAAGG | |
| | aaggcauL96 | | fgGfaacccs | | CAG | |
| | | | gsu | | | |
| AD- | gsgsagcuGf | 846 | asAfscagUf | 1206 | CAGGAGCTGT | 1566 |
| 1420974 | uGfAfAfucc | | uGfGfauucA | | GAATCCAACT | |
| | aacuguuL96 | | fcAfgcuccs | | GTA | |
| | | | usg | | | |
| AD- | gsusgaauCf | 847 | asAfsacuUf | 1207 | CTGTGAATCC | 1567 |
| 1420980 | cAfAfCfugu | | uAfCfaguuG | | AACTGTAAAG | |
| | aaaguuuL96 | | fgAfuucacs | | TTC | |
| | | | asg | | | |
| AD- | csasacugUf | 848 | asAfsacaAf | 1208 | TCCAACTGTA | 1568 |
| 1420987 | aAfAfGfuuc | | aGfAfacuuU | | AAGTTCTTTG | |
| | uuuguuuL96 | | faCfaguugs | | TTG | |
| | | | gsa | | | |
| AD- | ususcuuuGf | 849 | asUfscugUf | 1209 | AGTTCTTTGT | 1569 |
| 1420998 | uUfGfUfaaa | | aUfUfuacaA | | TGTAAATACA | |
| | uacagauL96 | | fcAfaagaas | | GAC | |
| | | | csu | | | |
| AD- | gsusuguaAf | 850 | asAfsgagAf | 1210 | TTGTTGTAAA | 1570 |
| 1421004 | aUfAfCfaga | | gUfCfuguaU | | TACAGACTCT | |
| | cucucuuL96 | | fuUfacaacs | | CTC | |
| | | | asa | | | |
| AD- | asgsacucUf | 851 | asUfsgacUf | 1211 | ACAGACTCTC | 1571 |
| 1421015 | cUfCfAfgcu | | gAfGfcugaG | | TCAGCTCAGT | |
| | cagucauL96 | | faGfagucus | | CAC | |
| | | | gsu | | | |
| AD- | uscsucagCf | 852 | asCfsauuGf | 1212 | TCTCTCAGCT | 1572 |
| 1421021 | uCfAfGfuca | | gUfGfacugA | | CAGTCACCAA | |
| | ccaauguL96 | | fgCfugagas | | TGC | |
| | | | gsa | | | |
| AD- | uscsagucAf | 853 | asGfsaagUf | 1213 | GCTCAGTCAC | 1573 |
| 1421028 | cCfAfAfugc | | uGfCfauugG | | CAATGCAACT | |
| | aacuucuL96 | | fuGfacugas | | TCC | |
| | | | gsc | | | |
| AD- | cscsaaugCf | 854 | asUfsuguAf | 1214 | CACCAATGCA | 1574 |
| 1421035 | aAfCfUfucc | | uGfGfaaguU | | ACTTCCATAC | |
| | auacaauL96 | | fgCfauuggs | | AAA | |
| | | | usg | | | |
| AD- | csasacuuCf | 855 | asAfsgugAf | 1215 | TGCAACTTCC | 1575 |
| 1421041 | cAfUfAfcaa | | uUfUfguauG | | ATACAAATCA | |
| | aucacuuL96 | | fgAfaguugs | | CTG | |
| | | | csa | | | |
| AD- | cscsauacAf | 856 | asAfsggaGf | 1216 | TTCCATACAA | 1576 |
| 1421047 | aAfUfCfacu | | cAfGfugauU | | ATCACTGCTC | |
| | gcuccuuL96 | | fuGfuauggs | | CTG | |
| | | | asa | | | |
| AD- | asuscacuGf | 857 | asAfsuagAf | 1217 | AAATCACTGC | 1577 |
| 1421055 | cUfCfCfugc | | aGfCfaggaG | | TCCTGCTTCT | |
| | uucuauuL96 | | fcAfgugaus | | ATG | |
| | | | usu | | | |
| AD- | uscscugcUf | 858 | asCfsuauCf | 1218 | GCTCCTGCTT | 1578 |
| 1421063 | uCfUfAfugu | | aAfCfauagA | | CTATGTTGAT | |
| | ugauaguL96 | | faGfcaggas | | AGG | |
| | | | gSC | | | |
| AD- | gsasucacUf | 859 | asAfscauCf | 1219 | GGGATCACTA | 1579 |
| 1421067 | aCfUfUfgug | | aCfAfcaagU | | CTTGTGTGAT | |
| | ugauguuL96 | | faGfugaucs | | GTG | |
| | | | cSC | | | |
| AD- | usascuugUf | 860 | asCfsaugUf | 1220 | ACTACTTGTG | 1580 |
| 1421073 | gUfGfAfugu | | cAfCfaucaC | | TGATGTGACA | |
| | gacauguL96 | | faCfaaguas | | TGG | |
| | | | gsu | | | |
| AD- | usgsacauGf | 861 | asUfsucuUf | 1221 | TGTGACATGG | 1581 |
| 1421086 | gGfCfAfaca | | gUfGfuugcC | | GCAACACAAG | |
| | caagaauL96 | | fcAfugucas | | AAA | |
| | | | csa | | | |
| AD- | gsgsgcaaCf | 862 | asAfsauuCf | 1222 | ATGGGCAACA | 1582 |
| 1421092 | aCfAfAfgaa | | uUfUfcuugU | | CAAGAAAGAA | |
| | agaauuuL96 | | fgUfugcccs | | TTT | |
| | | | asu | | | |
| AD- | csascaagAf | 863 | asCfsaaaGf | 1223 | AACACAAGAA | 1583 |
| 1421098 | aAfGfAfauu | | aAfAfuucuU | | AGAATTTCTT | |
| | ucuuuguL96 | | fuCfuugugs | | TGC | |
| | | | usu | | | |
| AD- | asasagaaUf | 864 | asCfscacUf | 1224 | AGAAAGAATT | 1584 |
| 1421104 | uUfCfUfuug | | gCfAfaagaA | | TCTTTGCAGT | |
| | cagugguL96 | | faUfucuuus | | GGC | |
| | | | csu | | | |
| AD- | gsusggcuCf | 865 | asUfscugAf | 1225 | CAGTGGCTCA | 1585 |
| 1421120 | aGfGfAfgga | | aUfCfcuccU | | GGAGGATTCA | |
| | uucagauL96 | | fgAfgccacs | | GAA | |
| | | | usg | | | |
| AD- | csasggagGf | 866 | asAfsauaGf | 1226 | CTCAGGAGGA | 1586 |
| 1421126 | aUfUfCfaga | | uUfCfugaaU | | TTCAGAACTA | |
| | acuauuuL96 | | fcCfuccugs | | TTC | |
| | | | asg | | | |
| AD- | gsasuucaGf | 867 | asUfsgacCf | 1227 | AGGATTCAGA | 1587 |
| 1421132 | aAfCfUfauu | | gAfAfuaguU | | ACTATTCGGT | |
| | cggucauL96 | | fcUfgaaucs | | CAT | |
| | | | csu | | | |
| AD- | csusauucGf | 868 | asAfsaauAf | 1228 | AACTATTCGG | 1588 |
| 1421141 | gUfCfAfugg | | uCfCfaugaC | | TCATGGATAT | |
| | auauuuuL96 | | fcGfaauags | | TTG | |
| | | | usu | | | |
| AD- | gsgsucauGf | 869 | asAfsgucAf | 1229 | TCGGTCATGG | 1589 |
| 1421147 | gAfUfAfuuu | | cAfAfauauC | | ATATTTGTGA | |
| | gugacuuL96 | | fcAfugaccs | | CTA | |
| | | | gsa | | | |
| AD- | gsgsauauUf | 870 | asCfsaucAf | 1230 | ATGGATATTT | 1590 |
| 1421153 | uGfUfGfacu | | uAfGfucacA | | GTGACTATGA | |
| | augauguL96 | | faAfuauccs | | TGA | |
| | | | asu | | | |
| AD- | usgsugacUf | 871 | asCfsuggAf | 1231 | TTTGTGACTA | 1591 |
| 1421160 | aUfGfAfuga | | uUfCfaucaU | | TGATGAATCC | |
| | auccaguL96 | | faGfucacas | | AGT | |
| | | | asa | | | |
| AD- | gsasugaaUf | 872 | asCfsaucUf | 1232 | ATGATGAATC | 1592 |
| 1421169 | cCfAfGfugg | | uCfCfacugG | | CAGTGGAAGA | |
| | aagauguL96 | | faUfucaucs | | TGG | |
| | | | asu | | | |
| AD- | csasguggAf | 873 | asAfsgcaGf | 1233 | TCCAGTGGAA | 1593 |
| 1421177 | aGfAfUfgga | | uUfCfcaucU | | GATGGAACTG | |
| | acugcuuL96 | | fuCfcacugs | | CTT | |
| | | | gsa | | | |
| AD- | asasgaugGf | 874 | asCfscacUf | 1234 | GGAAGATGGA | 1594 |
| 1421183 | aAfCfUfgcu | | aAfGfcaguU | | ACTGCTTAGT | |
| | uagugguL96 | | fcCfaucuus | | GGC | |
| | | | cSC | | | |
| AD- | ascsugcuUf | 875 | asUfsugcCf | 1235 | GAACTGCTTA | 1595 |
| 1421191 | aGfUfGfgca | | gUfGfccacU | | GTGGCACGGC | |
| | cggcaauL96 | | faAfgcagus | | AAC | |
| | | | usc | | | |
| AD- | usasguggCf | 876 | asAfsaugUf | 1236 | CTTAGTGGCA | 1596 |
| 1421197 | aCfGfGfcaa | | gUfUfgccgU | | CGGCAACACA | |
| | cacauuuL96 | | fgCfcacuas | | TTG | |
| | | | asg | | | |
| AD- | gsgscaacAf | 877 | asAfscucAf | 1237 | ACGGCAACAC | 1597 |
| 1421206 | cAfUfUfgaa | | uUfUfcaauG | | ATTGAAATGA | |
| | augaguuL96 | | fuGfuugccs | | GTA | |
| | | | gsu | | | |
| AD- | ascsauugAf | 878 | asAfsguaGf | 1238 | ACACATTGAA | 1598 |
| 1421212 | aAfUfGfagu | | uAfCfucauU | | ATGAGTACTA | |
| | acuacuuL96 | | fuCfaaugus | | CTG | |
| | | | gsu | | | |
| AD- | gsasguacUf | 879 | asCfsaacCf | 1239 | ATGAGTACTA | 1599 |
| 1421222 | aCfUfGfgcu | | cAfGfccagU | | CTGGCTGGGT | |
| | ggguuguL96 | | faGfuacucs | | TGG | |
| | | | asu | | | |
| AD- | usgsgcugGf | 880 | asUfsaaaUf | 1240 | ACTGGCTGGG | 1600 |
| 1421231 | gUfUfGfgaa | | cUfUfccaaC | | TTGGAAGATT | |
| | gauuuauL96 | | fcCfagccas | | TAG | |
| | | | gsu | | | |
| AD- | gsgsuuggAf | 881 | asAfsaggCf | 1241 | TGGGTTGGAA | 1601 |
| 1421237 | aGfAfUfuua | | cUfAfaaucU | | GATTTAGGCC | |
| | ggccuuuL96 | | fuCfcaaces | | TTC | |
| | | | csa | | | |
| AD- | gsasuuuaGf | 882 | asAfsgguUf | 1242 | AAGATTTAGG | 1602 |
| 1421245 | gCfCfUfuca | | cUfGfaaggC | | CCTTCAGAAC | |
| | gaaccuuL96 | | fcUfaaaucs | | CTC | |
| | | | usu | | | |
| AD- | cscsuucaGf | 883 | asGfsuaaAf | 1243 | GGCCTTCAGA | 1603 |
| 1421253 | aAfCfCfuca | | aUfGfagguU | | ACCTCATTTT | |
| | uuuuacuL96 | | fcUfgaaggs | | ACC | |
| | | | CSC | | | |
| AD- | gsasaccuCf | 884 | asUfscaaGf | 1244 | CAGAACCTCA | 1604 |
| 1421259 | aUfUfUfuac | | gGfUfaaaaU | | TTTTACCCTT | |
| | ccuugauL96 | | fgAfgguucs | | GAT | |
| | | | usg | | | |
| AD- | csasuuuuAf | 885 | asUfsuacCf | 1245 | CTCATTTTAC | 1605 |
| 1421265 | cCfCfUfuga | | aUfCfaaggG | | CCTTGATGGT | |
| | ugguaauL96 | | fuAfaaaugs | | AAT | |
| | | | asg | | | |
| AD- | ascsccuuGf | 886 | asAfsagcUf | 1246 | TTACCCTTGA | 1606 |
| 1421271 | aUfGfGfuaa | | aUfUfaccaU | | TGGTAATAGC | |
| | uagcuuuL96 | | fcAfagggus | | TTC | |
| | | | asa | | | |
| AD- | asusgguaAf | 887 | asCfsuugUf | 1247 | TGATGGTAAT | 1607 |
| 1421278 | uAfGfCfuuc | | aGfAfagcuA | | AGCTTCTACA | |
| | uacaaguL96 | | fuUfaccaus | | AGA | |
| | | | csa | | | |
| AD- | usasgcuuCf | 888 | asUfsgauGf | 1248 | AATAGCTTCT | 1608 |
| 1421285 | uAfCfAfaga | | aUfCfuuguA | | ACAAGATCAT | |
| | ucaucauL96 | | fgAfagcuas | | CAG | |
| | | | usu | | | |
| AD- | csasagauCf | 889 | asCfsuucAf | 1249 | TACAAGATCA | 1609 |
| 1421294 | aUfCfAfgca | | uUfGfcugaU | | TCAGCAATGA | |
| | augaaguL96 | | fgAfucuugs | | AGA | |
| | | | usa | | | |
| AD- | asgscaauGf | 890 | asCfsuguAf | 1250 | TCAGCAATGA | 1610 |
| 1421304 | aAfGfAfagg | | aCfCfuucuU | | AGAAGGTTAC | |
| | uuacaguL96 | | fcAfuugcus | | AGA | |
| | | | gsa | | | |
| AD- | gsasagguUf | 891 | asCfsaaaUf | 1251 | AAGAAGGTTA | 1611 |
| 1421313 | aCfAfGfaca | | gUfGfucugU | | CAGACACATT | |
| | cauuuguL96 | | faAfccuucs | | TGC | |
| | | | usu | | | |
| AD- | ascsagacAf | 892 | asGfsaaaUf | 1252 | TTACAGACAC | 1612 |
| 1421320 | cAfUfUfugc | | aGfCfaaauG | | ATTTGCTATT | |
| | uauuucuL96 | | fuGfucugus | | TCC | |
| | | | asa | | | |
| AD- | csasuuugCf | 893 | asCfsuauUf | 1253 | CACATTTGCT | 1613 |
| 1421327 | uAfUfUfucc | | uGfGfaaauA | | ATTTCCAAAT | |
| | aaauaguL96 | | fgCfaaaugs | | AGA | |
| | | | usg | | | |
| AD- | gsascugcAf | 894 | asUfsuugUf | 1254 | AAGACTGCAC | 1614 |
| 1421335 | cAfUfUfuau | | aAfUfaaauG | | ATTTATTACA | |
| | uacaaauL96 | | fuGfcagucs | | AAA | |
| | | | usu | | | |
| AD- | ascsauuuAf | 895 | asGfsugcCf | 1255 | GCACATTTAT | 1615 |
| 1421341 | uUfAfCfaaa | | uUfUfuguaA | | TACAAAAGGC | |
| | aggcacuL96 | | fuAfaaugus | | ACC | |
| | | | gsc | | | |
| AD- | ususacaaAf | 896 | asUfsuccCf | 1256 | TATTACAAAA | 1616 |
| 1421348 | aGfGfCfacc | | aGfGfugccU | | GGCACCTGGG | |
| | ugggaauL96 | | fuUfuguaas | | AAG | |
| | | | usa | | | |
| AD- | gsgscaccUf | 897 | asCfscgaUf | 1257 | AAGGCACCTG | 1617 |
| 1421356 | gGfGfAfagu | | gAfCfuuccC | | GGAAGTCATC | |
| | caucgguL96 | | faGfgugccs | | GGG | |
| | | | usu | | | |
| AD- | usgsggaaGf | 898 | asUfscuaUf | 1258 | CCTGGGAAGT | 1618 |
| 1421362 | uCfAfUfcgg | | cCfCfgaugA | | CATCGGGATA | |
| | gauagauL96 | | fcUfucccas | | GAA | |
| | | | gsg | | | |
| AD- | gsuscaucGf | 899 | asAfsgagCf | 1259 | AAGTCATCGG | 1619 |
| 1421368 | gGfAfUfaga | | uUfCfuaucC | | GATAGAAGCT | |
| | agcucuuL96 | | fcGfaugacs | | CTA | |
| | | | usu | | | |
| AD- | gsgsauagAf | 900 | asAfscugGf | 1260 | CGGGATAGAA | 1620 |
| 1421375 | aGfCfUfcua | | uUfAfgagcU | | GCTCTAACCA | |
| | accaguuL96 | | fuCfuauccs | | GTG | |
| | | | csg | | | |
| AD- | gscsucuaAf | 901 | asAfsgauAf | 1261 | AAGCTCTAAC | 1621 |
| 1421383 | cCfAfGfuga | | aUfCfacugG | | CAGTGATTAT | |
| | uuaucuuL96 | | fuUfagagcs | | CTA | |
| | | | usu | | | |
| AD- | ascscaguGf | 902 | asUfsaguAf | 1262 | TAACCAGTGA | 1622 |
| 1421389 | aUfUfAfucu | | uAfGfauaaU | | TTATCTATAC | |
| | auacuauL96 | | fcAfcuggus | | TAC | |
| | | | usa | | | |
| AD- | gsasuuauCf | 903 | asCfsuaaUf | 1263 | GTGATTATCT | 1623 |
| 1421394 | uAfUfAfcua | | gUfAfguauA | | ATACTACATT | |
| | cauuaguL96 | | fgAfuaaucs | | AGT | |
| | | | asc | | | |
| AD- | usasaugaAf | 904 | asGfscauUf | 1264 | AGTAATGAAT | 1624 |
| 1421408 | uAfUfAfaag | | cCfUfuuauA | | ATAAAGGAAT | |
| | gaaugcuL96 | | fuUfcauuas | | GCC | |
| | | | csu | | | |
| AD- | asusauaaAf | 905 | asCfsuccUf | 1265 | GAATATAAAG | 1625 |
| 1421414 | gGfAfAfugc | | gGfCfauucC | | GAATGCCAGG | |
| | caggaguL96 | | fuUfuauaus | | AGG | |
| | | | usc | | | |
| AD- | csasggagGf | 906 | asAfsuaaAf | 1266 | GCCAGGAGGA | 1626 |
| 1421428 | aAfGfGfaau | | gAfUfuccuU | | AGGAATCTTT | |
| | cuuuauuL96 | | fcCfuccugs | | ATA | |
| | | | gsc | | | |
| AD- | gsasaggaAf | 907 | asGfsauuUf | 1267 | AGGAAGGAAT | 1627 |
| 1421433 | uCfUfUfuau | | uAfUfaaagA | | CTTTATAAAA | |
| | aaaaucuL96 | | fuUfccuucs | | TCC | |
| | | | csu | | | |
| AD- | ususauaaAf | 908 | asCfsacuAf | 1268 | CTTTATAAAA | 1628 |
| 1421441 | aUfCfCfaac | | aGfUfuggaU | | TCCAACTTAG | |
| | uuaguguL96 | | fuUfuauaas | | TGA | |
| | | | asg | | | |
| AD- | csasacuuAf | 909 | asUfsuugUf | 1269 | TCCAACTTAG | 1629 |
| 1421451 | gUfGfAfcua | | aUfAfgucaC | | TGACTATACA | |
| | uacaaauL96 | | fuAfaguugs | | AAA | |
| | | | gsa | | | |
| AD- | usgsacuaUf | 910 | asAfsuguCf | 1270 | AGTGACTATA | 1630 |
| 1421459 | aCfAfAfaag | | aCfUfuuugU | | CAAAAGTGAC | |
| | ugacauuL96 | | faUfagucas | | ATG | |
| | | | csu | | | |
| AD- | asasaaguGf | 911 | asAfsacuGf | 1271 | ACAAAAGTGA | 1631 |
| 1421468 | aCfAfUfgcc | | aGfGfcaugU | | CATGCCTCAG | |
| | ucaguuuL96 | | fcAfcuuuus | | TTG | |
| | | | gsu | | | |
| AD- | cscsucagUf | 912 | asGfsauuCf | 1272 | TGCCTCAGTT | 1632 |
| 1421480 | uGfUfGfagc | | aGfCfucacA | | GTGAGCTGAA | |
| | ugaaucuL96 | | faCfugaggs | | TCC | |
| | | | csa | | | |
| AD- | gsasgcugAf | 913 | asCfsaccUf | 1273 | GTGAGCTGAA | 1633 |
| 1421490 | aUfCfCfgga | | uUfCfcggaU | | TCCGGAAAGG | |
| | aagguguL96 | | fuCfagcucs | | TGT | |
| | | | aSC | | | |
| AD- | cscsggaaAf | 914 | asUfsaguAf | 1274 | ATCCGGAAAG | 1634 |
| 1421499 | gGfUfGfuca | | cUfGfacacC | | GTGTCAGTAC | |
| | guacuauL96 | | fuUfuccggs | | TAT | |
| | | | asu | | | |
| AD- | asgsguguCf | 915 | asAfscagAf | 1275 | AAAGGTGTCA | 1635 |
| 1421505 | aGfUfAfcua | | aUfAfguacU | | GTACTATTCT | |
| | uucuguuL96 | | fgAfcaccus | | GTG | |
| | | | usu | | | |
| AD- | csasguacUf | 916 | asAfsaugAf | 1276 | GTCAGTACTA | 1636 |
| 1421511 | aUfUfCfugu | | cAfCfagaaU | | TTCTGTGTCA | |
| | gucauuuL96 | | faGfuacugs | | TTC | |
| | | | aSC | | | |
| AD- | csusguguCf | 917 | asCfsucuUf | 1277 | TTCTGTGTCA | 1637 |
| 1421521 | aUfUfCfagu | | uAfCfugaaU | | TTCAGTAAAG | |
| | aaagaguL96 | | fgAfcacags | | AGG | |
| | | | asa | | | |
| AD- | uscsaguaAf | 918 | asAfsuacUf | 1278 | ATTCAGTAAA | 1638 |
| 1421530 | aGfAfGfgcg | | uCfGfccucU | | GAGGCGAAGT | |
| | aaguauuL96 | | fuUfacugas | | ATT | |
| | | | asu | | | |
| AD- | gsasggcgAf | 919 | asAfsgcuGf | 1279 | AAGAGGCGAA | 1639 |
| 1421538 | aGfUfAfuua | | aUfAfauacU | | GTATTATCAG | |
| | ucagcuuL96 | | fuCfgccucs | | CTG | |
| | | | usu | | | |
| AD- | gsusauuaUf | 920 | asAfsacaUf | 1280 | AAGTATTATC | 1640 |
| 1421546 | cAfGfCfuga | | cUfCfagcuG | | AGCTGAGATG | |
| | gauguuuL96 | | faUfaauacs | | TTC | |
| | | | usu | | | |
| AD- | csuscuauAf | 921 | asCfsugcUf | 1281 | CCCTCTATAC | 1641 |
| 1421563 | cUfCfUfaca | | gUfGfuagaG | | TCTACACAGC | |
| | cagcaguL96 | | fuAfuagags | | AGC | |
| | | | gsg | | | |
| AD- | csuscuacAf | 922 | asAfsuucAf | 1282 | TACTCTACAC | 1642 |
| 1421570 | cAfGfCfagc | | cGfCfugcuG | | AGCAGCGTGA | |
| | gugaauuL96 | | fuGfuagags | | ATG | |
| | | | usa | | | |
| AD- | asgscagcGf | 923 | asCfscuuUf | 1283 | ACAGCAGCGT | 1643 |
| 1421578 | uGfAfAfuga | | aUfCfauucA | | GAATGATAAA | |
| | uaaagguL96 | | fcGfcugcus | | GGG | |
| | | | gsu | | | |
| AD- | asasugauAf | 924 | asAfscucUf | 1284 | TGAATGATAA | 1644 |
| 1421587 | aAfGfGfgcu | | cAfGfcccuU | | AGGGCTGAGA | |
| | gagaguuL96 | | fuAfucauus | | GTC | |
| | | | csa | | | |
| AD- | gsgsgcugAf | 925 | asUfscuuCf | 1285 | AAGGGCTGAG | 1645 |
| 1421596 | gAfGfUfccu | | cAfGfgacuC | | AGTCCTGGAA | |
| | ggaagauL96 | | fuCfagcccs | | GAC | |
| | | | usu | | | |
| AD- | asgsuccuGf | 926 | asCfsugaAf | 1286 | AGAGTCCTGG | 1646 |
| 1421604 | gAfAfGfaca | | uUfGfucuuC | | AAGACAATTC | |
| | auucaguL96 | | fcAfggacus | | AGC | |
| | | | csu | | | |
| AD- | asasgacaAf | 927 | asAfsuccAf | 1287 | GGAAGACAAT | 1647 |
| 1421612 | uUfCfAfgcu | | aAfGfcugaA | | TCAGCTTTGG | |
| | uuggauuL96 | | fuUfgucuus | | ATA | |
| | | | CSC | | | |
| AD- | uscsagcuUf | 928 | asAfsgcaUf | 1288 | ATTCAGCTTT | 1648 |
| 1421620 | uGfGfAfuaa | | uUfUfauccA | | GGATAAAATG | |
| | aaugcuuL96 | | faAfgcugas | | CTG | |
| | | | asu | | | |
| AD- | gsasuaaaAf | 929 | asAfscauUf | 1289 | TGGATAAAAT | 1649 |
| 1421629 | uGfCfUfgca | | cUfGfcagcA | | GCTGCAGAAT | |
| | gaauguuL96 | | fuUfuuaucs | | GTC | |
| | | | csa | | | |
| AD- | asusgcugCf | 930 | asAfsucuGf | 1290 | AAATGCTGCA | 1650 |
| 1421635 | aGfAfAfugu | | gAfCfauucU | | GAATGTCCAG | |
| | ccagauuL96 | | fgCfagcaus | | ATG | |
| | | | usu | | | |
| AD- | csusggacUf | 931 | asUfsucaAf | 1291 | AACTGGACTT | 1651 |
| 1421650 | uCfAfUfuau | | aAfUfaaugA | | CATTATTTTG | |
| | uuugaauL96 | | faGfuccags | | AAT | |
| | | | usu | | | |
| AD- | asasacaaAf | 932 | asCfsugaUf | 1292 | TGAAACAAAA | 1652 |
| 1421662 | aUfUfUfugg | | aCfCfaaaaU | | TTTTGGTATC | |
| | uaucaguL96 | | fuUfuguuus | | AGA | |
| | | | csa | | | |
| AD- | ususgguaUf | 933 | asGfscaaGf | 1293 | TTTTGGTATC | 1653 |
| 1421672 | cAfGfAfuga | | aUfCfaucuG | | AGATGATCTT | |
| | ucuugcuL96 | | faUfaccaas | | GCC | |
| | | | asa | | | |
| AD- | csasgaugAf | 934 | asUfsgagGf | 1294 | ATCAGATGAT | 1654 |
| 1421679 | uCfUfUfgcc | | aGfGfcaagA | | CTTGCCTCCT | |
| | uccucauL96 | | fuCfaucugs | | CAT | |
| | | | asu | | | |
| AD- | asuscuugCf | 935 | asUfscaaAf | 1295 | TGATCTTGCC | 1655 |
| 1421685 | cUfCfCfuca | | aUfGfaggaG | | TCCTCATTTT | |
| | uuuugauL96 | | fgCfaagaus | | GAT | |
| | | | csa | | | |
| AD- | cscsuccuCf | 936 | asGfsauuUf | 1296 | TGCCTCCTCA | 1656 |
| 1421691 | aUfUfUfuga | | aUfCfaaaaU | | TTTTGATAAA | |
| | uaaaucuL96 | | fgAfggaggs | | TCC | |
| | | | csa | | | |
| AD- | csasuuuuGf | 937 | asUfsucuUf | 1297 | CTCATTTTGA | 1657 |
| 1421697 | aUfAfAfauc | | gGfAfuuuaU | | TAAATCCAAG | |
| | caagaauL96 | | fcAfaaaugs | | AAA | |
| | | | asg | | | |
| AD- | asasauccAf | 938 | asAfsgagGf | 1298 | ATAAATCCAA | 1658 |
| 1421706 | aGfAfAfaua | | aUfAfuuucU | | GAAATATCCT | |
| | uccucuuL96 | | fuGfgauuus | | CTA | |
| | | | asu | | | |
| AD- | asasgaaaUf | 939 | asAfsauaGf | 1299 | CCAAGAAATA | 1659 |
| 1421712 | aUfCfCfucu | | uAfGfaggaU | | TCCTCTACTA | |
| | acuauuuL96 | | faUfuucuus | | TTA | |
| | | | gsg | | | |
| AD- | csuscuacUf | 940 | asAfsuacAf | 1300 | TCCTCTACTA | 1660 |
| 1421722 | aUfUfAfgau | | cAfUfcuaaU | | TTAGATGTGT | |
| | guguauuL96 | | faGfuagags | | ATG | |
| | | | gsa | | | |
| AD- | asgsacacUf | 941 | asUfscagUf | 1301 | GCAGACACTG | 1661 |
| 1421765 | gUfCfUfuca | | cUfGfaagaC | | TCTTCAGACT | |
| | gacugauL96 | | faGfugucus | | GAA | |
| | | | gsc | | | |
| AD- | usgsucuuCf | 942 | asCfsccaGf | 1302 | ACTGTCTTCA | 1662 |
| 1421771 | aGfAfCfuga | | uUfCfagucU | | GACTGAACTG | |
| | acuggguL96 | | fgAfagacas | | GGC | |
| | | | gsu | | | |
| AD- | asgsacugAf | 943 | asUfsaagUf | 1303 | TCAGACTGAA | 1663 |
| 1421778 | aCfUfGfggc | | gGfCfccagU | | CTGGGCCACT | |
| | cacuuauL96 | | fuCfagucus | | TAC | |
| | | | gsa | | | |
| AD- | cscsacuuAf | 944 | asUfsgugCf | 1304 | GGCCACTTAC | 1664 |
| 1421791 | cCfUfUfgca | | uUfGfcaagG | | CTTGCAAGCA | |
| | agcacauL96 | | fuAfaguggs | | CAG | |
| | | | CSC | | | |
| AD- | ususgcaaGf | 945 | asAfsaugUf | 1305 | CCTTGCAAGC | 1665 |
| 1421800 | cAfCfAfgaa | | uUfUfcuguG | | ACAGAAAACA | |
| | aacauuuL96 | | fcUfugcaas | | TTA | |
| | | | gsg | | | |
| AD- | csascagaAf | 946 | asCfsuacUf | 1306 | AGCACAGAAA | 1666 |
| 1421807 | aAfCfAfuua | | aUfAfauguU | | ACATTATAGT | |
| | uaguaguL96 | | fuUfcugugs | | AGC | |
| | | | csu | | | |
| AD- | ascsauuaUf | 947 | asAfsaagCf | 1307 | AAACATTATA | 1667 |
| 1421815 | aGfUfAfgcu | | uAfGfcuacU | | GTAGCTAGCT | |
| | agcuuuuL96 | | faUfaaugus | | TTG | |
| | | | usu | | | |
| AD- | gsusagcuAf | 948 | asCfsugcCf | 1308 | TAGTAGCTAG | 1668 |
| 1421823 | gCfUfUfuga | | aUfCfaaagC | | CTTTGATGGC | |
| | uggcaguL96 | | fuAfgcuacs | | AGA | |
| | | | usa | | | |
| AD- | gscsuuugAf | 949 | asAfscuuCf | 1309 | TAGCTTTGAT | 1669 |
| 1421830 | uGfGfCfaga | | cUfCfugccA | | GGCAGAGGAA | |
| | ggaaguuL96 | | fuCfaaagcs | | GTG | |
| | | | usa | | | |
| AD- | gscsagagGf | 950 | asUfsuggUf | 1310 | TGGCAGAGGA | 1670 |
| 1421839 | aAfGfUfggu | | aAfCfcacuU | | AGTGGTTACC | |
| | uaccaauL96 | | fcCfucugcs | | AAG | |
| | | | csa | | | |
| AD- | gsgsuuacCf | 951 | asAfsucuUf | 1311 | GTGGTTACCA | 1671 |
| 1421850 | aAfGfGfaga | | aUfCfuccuU | | AGGAGATAAG | |
| | uaagauuL96 | | fgGfuaaccs | | ATC | |
| | | | aSC | | | |
| AD- | asasggagAf | 952 | asAfsugcAf | 1312 | CCAAGGAGAT | 1672 |
| 1421857 | uAfAfGfauc | | uGfAfucuuA | | AAGATCATGC | |
| | augcauuL96 | | fuCfuccuus | | ATG | |
| | | | gsg | | | |
| AD- | asasgaucAf | 953 | asUfsugaUf | 1313 | ATAAGATCAT | 1673 |
| 1421865 | uGfCfAfugc | | uGfCfaugcA | | GCATGCAATC | |
| | aaucaauL96 | | fuGfaucuus | | AAC | |
| | | | asu | | | |
| AD- | csasugcaAf | 954 | asAfsgucUf | 1314 | TGCATGCAAT | 1674 |
| 1421874 | uCfAfAfcag | | uCfUfguugA | | CAACAGAAGA | |
| | aagacuuL96 | | fuUfgcaugs | | CTG | |
| | | | csa | | | |
| AD- | ascsagaaGf | 955 | asAfsaauGf | 1315 | CAACAGAAGA | 1675 |
| 1421884 | aCfUfGfgga | | uUfCfccagU | | CTGGGAACAT | |
| | acauuuuL96 | | fcUfucugus | | TTG | |
| | | | usg | | | |
| AD- | ascsugggAf | 956 | asCfsaacUf | 1316 | AGACTGGGAA | 1676 |
| 1421891 | aCfAfUfuug | | uCfAfaaugU | | CATTTGAAGT | |
| | aaguuguL96 | | fuCfccagus | | TGA | |
| | | | csu | | | |
| AD- | asascauuUf | 957 | asGfsaucUf | 1317 | GGAACATTTG | 1677 |
| 1421897 | gAfAfGfuug | | uCfAfacuuC | | AAGTTGAAGA | |
| | aagaucuL96 | | faAfauguus | | TCA | |
| | | | CSC | | | |
| AD- | usgsaaguUf | 958 | asCfsaauUf | 1318 | TTTGAAGTTG | 1678 |
| 1421903 | gAfAfGfauc | | uGfAfucuuC | | AAGATCAAAT | |
| | aaauuguL96 | | faAfcuucas | | TGA | |
| | | | asa | | | |
| AD- | usgsaagaUf | 959 | asCfsugcUf | 1319 | GTTGAAGATC | 1679 |
| 1421909 | cAfAfAfuug | | uCfAfauuuG | | AAATTGAAGC | |
| | aagcaguL96 | | faUfcuucas | | AGC | |
| | | | asc | | | |
| AD- | asasauugAf | 960 | asUfsuguCf | 1320 | TCAAATTGAA | 1680 |
| 1421917 | aGfCfAfgcc | | uGfGfcugcU | | GCAGCCAGAC | |
| | agacaauL96 | | fuCfaauuus | | AAT | |
| | | | gsa | | | |
| AD- | gscsagccAf | 961 | asUfsuugAf | 1321 | AAGCAGCCAG | 1681 |
| 1421925 | gAfCfAfauu | | aAfAfuuguC | | ACAATTTTCA | |
| | uucaaauL96 | | fuGfgcugcs | | AAA | |
| | | | usu | | | |
| AD- | gsgsgauuUf | 962 | asGfsuuuGf | 1322 | ATGGGATTTG | 1682 |
| 1421948 | gUfGfGfaca | | uUfGfuccaC | | TGGACAACAA | |
| | acaaacuL96 | | faAfaucccs | | ACG | |
| | | | asu | | | |
| AD- | usgsuggaCf | 963 | asCfsaauUf | 1323 | TTTGTGGACA | 1683 |
| 1421954 | aAfCfAfaac | | cGfUfuuguU | | ACAAACGAAT | |
| | gaauuguL96 | | fgUfccacas | | TGC | |
| | | | asa | | | |
| AD- | asascaaaCf | 964 | asCfsaaaUf | 1324 | ACAACAAACG | 1684 |
| 1421961 | gAfAfUfugc | | uGfCfaauuC | | AATTGCAATT | |
| | aauuuguL96 | | fgUfuuguus | | TGG | |
| | | | gsu | | | |
| AD- | gsgsucauAf | 965 | asUfsacgUf | 1325 | CTGGTCATAT | 1685 |
| 1421968 | uGfGfAfggg | | aCfCfcuccA | | GGAGGGTACG | |
| | uacguauL96 | | fuAfugaccs | | TAA | |
| | | | asg | | | |
| AD- | gsgsguacGf | 966 | asAfsccaUf | 1326 | GAGGGTACGT | 1686 |
| 1421979 | uAfAfCfcuc | | uGfAfgguuA | | AACCTCAATG | |
| | aaugguuL96 | | fcGfuacccs | | GTC | |
| | | | usc | | | |
| AD- | asuscgggAf | 967 | asUfsgaaCf | 1327 | GGATCGGGAA | 1687 |
| 1422005 | aGfUfGfgcg | | aCfGfccacU | | GTGGCGTGTT | |
| | uguucauL96 | | fuCfccgaus | | CAA | |
| | | | cSC | | | |
| AD- | usgsgcguGf | 968 | asUfsuccAf | 1328 | AGTGGCGTGT | 1688 |
| 1422014 | uUfCfAfagu | | cAfCfuugaA | | TCAAGTGTGG | |
| | guggaauL96 | | fcAfcgccas | | AAT | |
| | | | csu | | | |
| AD- | ususcaagUf | 969 | asAfscggCf | 1329 | TGTTCAAGTG | 1689 |
| 1422021 | gUfGfGfaau | | uAfUfuccaC | | TGGAATAGCC | |
| | agccguuL96 | | faCfuugaas | | GTG | |
| | | | csa | | | |
| AD- | usgsggagUf | 970 | asAfscugAf | 1330 | GGTGGGAGTA | 1690 |
| 1422057 | aCfUfAfuga | | gUfCfauagU | | CTATGACTCA | |
| | cucaguuL96 | | faCfucccas | | GTG | |
| | | | cSC | | | |
| AD- | asusgacuCf | 971 | asUfsucuGf | 1331 | CTATGACTCA | 1691 |
| 1422067 | aGfUfGfuac | | uGfUfacacU | | GTGTACACAG | |
| | acagaauL96 | | fgAfgucaus | | AAC | |
| | | | asg | | | |
| AD- | gsusguacAf | 972 | asAfsuguAf | 1332 | CAGTGTACAC | 1692 |
| 1422075 | cAfGfAfacg | | aCfGfuucuG | | AGAACGTTAC | |
| | uuacauuL96 | | fuGfuacacs | | ATG | |
| | | | usg | | | |
| AD- | ascsagaaCf | 973 | asAfsgacCf | 1333 | ACACAGAACG | 1693 |
| 1422081 | gUfUfAfcau | | cAfUfguaaC | | TTACATGGGT | |
| | gggucuuL96 | | fgUfucugus | | CTC | |
| | | | gsu | | | |
| AD- | gsusuacaUf | 974 | asAfsguuGf | 1334 | ACGTTACATG | 1694 |
| 1422088 | gGfGfUfcuc | | gGfAfgaccC | | GGTCTCCCAA | |
| | ccaacuuL96 | | faUfguaacs | | CTC | |
| | | | gsu | | | |
| AD- | gsgsucucCf | 975 | asUfscuuCf | 1335 | TGGGTCTCCC | 1695 |
| 1422096 | cAfAfCfucc | | uGfGfaguuG | | AACTCCAGAA | |
| | agaagauL96 | | fgGfagaccs | | GAC | |
| | | | csa | | | |
| AD- | csasacucCf | 976 | asAfsaggUf | 1336 | CCCAACTCCA | 1696 |
| 1422103 | aGfAfAfgac | | uGfUfcuucU | | GAAGACAACC | |
| | aaccuuuL96 | | fgGfaguugs | | TTG | |
| | | | gsg | | | |
| AD- | gsascaacCf | 977 | asCfsuguAf | 1337 | AAGACAACCT | 1697 |
| 1422114 | uUfGfAfcca | | aUfGfgucaA | | TGACCATTAC | |
| | uuacaguL96 | | fgGfuugucs | | AGA | |
| | | | usu | | | |
| AD- | csusugacCf | 978 | asGfsaauUf | 1338 | ACCTTGACCA | 1698 |
| 1422120 | aUfUfAfcag | | uCfUfguaaU | | TTACAGAAAT | |
| | aaauucuL96 | | fgGfucaags | | TCA | |
| | | | gsu | | | |
| AD- | asusuacaGf | 979 | asGfsacuGf | 1339 | CCATTACAGA | 1699 |
| 1422127 | aAfAfUfuca | | uUfGfaauuU | | AATTCAACAG | |
| | acagucuL96 | | fcUfguaaus | | TCA | |
| | | | gsg | | | |
| AD- | gsasaauuCf | 980 | asGfscucAf | 1340 | CAGAAATTCA | 1700 |
| 1422133 | aAfCfAfguc | | uGfAfcuguU | | ACAGTCATGA | |
| | augagcuL96 | | fgAfauuucs | | GCA | |
| | | | usg | | | |
| AD- | uscsaugaGf | 981 | asAfsuuuUf | 1341 | AGTCATGAGC | 1701 |
| 1422145 | cAfGfAfgcu | | cAfGfcucuG | | AGAGCTGAAA | |
| | gaaaauuL96 | | fcUfcaugas | | ATT | |
| | | | csu | | | |
| AD- | gscsagagCf | 982 | asUfsuuaAf | 1342 | GAGCAGAGCT | 1702 |
| 1422151 | uGfAfAfaau | | aAfUfuuucA | | GAAAATTTTA | |
| | uuuaaauL96 | | fgCfucugcs | | AAC | |
| | | | usc | | | |
| AD- | ususuaaaCf | 983 | asAfsgguAf | 1343 | ATTTTAAACA | 1703 |
| 1422161 | aAfGfUfuga | | cUfCfaacuU | | AGTTGAGTAC | |
| | guaccuuL96 | | fgUfuuaaas | | CTC | |
| | | | asu | | | |
| AD- | asgsuugaGf | 984 | asGfsaauAf | 1344 | CAAGTTGAGT | 1704 |
| 1422169 | uAfCfCfucc | | aGfGfagguA | | ACCTCCTTAT | |
| | uuauucuL96 | | fcUfcaacus | | TCA | |
| | | | usg | | | |
| AD- | usasccucCf | 985 | asGfsuucCf | 1345 | AGTACCTCCT | 1705 |
| 1422176 | uUfAfUfuca | | aUfGfaauaA | | TATTCATGGA | |
| | uggaacuL96 | | fgGfagguas | | ACA | |
| | | | csu | | | |
| AD- | ususauucAf | 986 | asAfsucuGf | 1346 | CCTTATTCAT | 1706 |
| 1422183 | uGfGfAfaca | | cUfGfuuccA | | GGAACAGCAG | |
| | gcagauuL96 | | fuGfaauaas | | ATG | |
| | | | gsg | | | |
| AD- | gsasacagCf | 987 | asAfsacgUf | 1347 | TGGAACAGCA | 1707 |
| 1422192 | aGfAfUfgau | | uAfUfcaucU | | GATGATAACG | |
| | aacguuuL96 | | fgCfuguucs | | TTC | |
| | | | csa | | | |
| AD- | csasgaugAf | 988 | asAfsaagUf | 1348 | AGCAGATGAT | 1708 |
| 1422198 | uAfAfCfguu | | gAfAfcguuA | | AACGTTCACT | |
| | cacuuuuL96 | | fuCfaucugs | | TTC | |
| | | | csu | | | |
| AD- | usasacguUf | 989 | asAfscugCf | 1349 | GATAACGTTC | 1709 |
| 1422205 | cAfCfUfuuc | | uGfAfaaguG | | ACTTTCAGCA | |
| | agcaguuL96 | | faAfcguuas | | GTC | |
| | | | usc | | | |
| AD- | uscsacuuUf | 990 | asGfsagcUf | 1350 | GTTCACTTTC | 1710 |
| 1422211 | cAfGfCfagu | | gAfCfugcuG | | AGCAGTCAGC | |
| | cagcucuL96 | | faAfagugas | | TCA | |
| | | | asc | | | |
| AD- | gscsagucAf | 991 | asUfsggaGf | 1351 | CAGCAGTCAG | 1711 |
| 1422220 | gCfUfCfaga | | aUfCfugagC | | CTCAGATCTC | |
| | ucuccauL96 | | fuGfacugcs | | CAA | |
| | | | usg | | | |
| AD- | gscsucagAf | 992 | asAfsgggCf | 1352 | CAGCTCAGAT | 1712 |
| 1422227 | uCfUfCfcaa | | uUfUfggagA | | CTCCAAAGCC | |
| | agcccuuL96 | | fuCfugagcs | | CTG | |
| | | | usg | | | |
| AD- | uscsuccaAf | 993 | asAfsucgAf | 1353 | GATCTCCAAA | 1713 |
| 1422234 | aGfCfCfcug | | cCfAfgggcU | | GCCCTGGTCG | |
| | gucgauuL96 | | fuUfggagas | | ATG | |
| | | | usc | | | |
| AD- | gscsccugGf | 994 | asAfscucCf | 1354 | AAGCCCTGGT | 1714 |
| 1422242 | uCfGfAfugu | | aAfCfaucgA | | CGATGTTGGA | |
| | uggaguuL96 | | fcCfagggcs | | GTG | |
| | | | usu | | | |
| AD- | gsuscgauGf | 995 | asAfsaauCf | 1355 | TGGTCGATGT | 1715 |
| 1422248 | uUfGfGfagu | | cAfCfuccaA | | TGGAGTGGAT | |
| | ggauuuuL96 | | fcAfucgacs | | TTC | |
| | | | csa | | | |
| AD- | asgsuggaUf | 996 | asAfscauUf | 1356 | GGAGTGGATT | 1716 |
| 1422259 | uUfCfCfagg | | gCfCfuggaA | | TCCAGGCAAT | |
| | caauguuL96 | | faUfccacus | | GTG | |
| | | | cSC | | | |
| AD- | uscscaggCf | 997 | asAfsguaUf | 1357 | TTTCCAGGCA | 1717 |
| 1422267 | aAfUfGfugg | | aCfCfacauU | | ATGTGGTATA | |
| | uauacuuL96 | | fgCfcuggas | | CTG | |
| | | | asa | | | |
| AD- | asasugugGf | 998 | asCfsuucAf | 1358 | GCAATGTGGT | 1718 |
| 1422274 | uAfUfAfcug | | uCfAfguauA | | ATACTGATGA | |
| | augaaguL96 | | fcCfacauus | | AGA | |
| | | | gsc | | | |
| AD- | gsusauacUf | 999 | asCfsaugGf | 1359 | TGGTATACTG | 1719 |
| 1422280 | gAfUfGfaag | | uCfUfucauC | | ATGAAGACCA | |
| | accauguL96 | | faGfuauacs | | TGG | |
| | | | csa | | | |
| AD- | asusgaagAf | 1000 | asAfsgcuAf | 1360 | TGATGAAGAC | 1720 |
| 1422288 | cCfAfUfgga | | uUfCfcaugG | | CATGGAATAG | |
| | auagcuuL96 | | fuCfuucaus | | CTA | |
| | | | csa | | | |
| AD- | cscsauggAf | 1001 | asUfsgcuGf | 1361 | GACCATGGAA | 1721 |
| 1422295 | aUfAfGfcua | | cUfAfgcuaU | | TAGCTAGCAG | |
| | gcagcauL96 | | fuCfcauggs | | CAC | |
| | | | usc | | | |
| AD- | asusagcuAf | 1002 | asUfsgugCf | 1362 | GAATAGCTAG | 1722 |
| 1422302 | gCfAfGfcac | | uGfUfgcugC | | CAGCACAGCA | |
| | agcacauL96 | | fuAfgcuaus | | CAC | |
| | | | usc | | | |
| AD- | csasgcacAf | 1003 | asUfsaugUf | 1363 | AGCAGCACAG | 1723 |
| 1422310 | gCfAfCfacc | | uGfGfugugC | | CACACCAACA | |
| | aacauauL96 | | fuGfugcugs | | TAT | |
| | | | csu | | | |
| AD- | asgscacaCf | 1004 | asUfsauaUf | 1364 | ACAGCACACC | 1724 |
| 1422316 | cAfAfCfaua | | aUfAfuguuG | | AACATATATA | |
| | uauauauL96 | | fgUfgugcus | | TAC | |
| | | | gsu | | | |
| AD- | cscsaacaUf | 1005 | asUfsgugGf | 1365 | CACCAACATA | 1725 |
| 1422322 | aUfAfUfaua | | gUfAfuauaU | | TATATACCCA | |
| | cccacauL96 | | faUfguuggs | | CAT | |
| | | | usg | | | |
| AD- | usascccaCf | 1006 | asUfsgaaGf | 1366 | TATACCCACA | 1726 |
| 1422334 | aUfGfAfgcc | | uGfGfcucaU | | TGAGCCACTT | |
| | acuucauL96 | | fgUfggguas | | CAT | |
| | | | usa | | | |
| AD- | csasugagCf | 1007 | asGfsuuuUf | 1367 | CACATGAGCC | 1727 |
| 1422340 | cAfCfUfuca | | aUfGfaaguG | | ACTTCATAAA | |
| | uaaaacuL96 | | fgCfucaugs | | ACA | |
| | | | usg | | | |
| AD- | cscsacuuCf | 1008 | asAfsacaUf | 1368 | AGCCACTTCA | 1728 |
| 1422346 | aUfAfAfaac | | uGfUfuuuaU | | TAAAACAATG | |
| | aauguuuL96 | | fgAfaguggs | | TTT | |
| | | | csu | | | |
| AD- | asascaauGf | 1009 | asAfsgguAf | 1369 | AAAACAATGT | 1729 |
| 1422357 | uUfUfCfucu | | aAfGfagaaA | | TTCTCTTTAC | |
| | uuaccuuL96 | | fcAfuuguus | | CTT | |
| | | | usu | | | |
| AD- | gsusuucuCf | 1010 | asGfsugcUf | 1370 | ATGTTTCTCT | 1730 |
| 1422363 | uUfUfAfccu | | aAfGfguaaA | | TTACCTTAGC | |
| | uagcacuL96 | | fgAfgaaacs | | ACC | |
| | | | asu | | | |
| AD- | ususuaccUf | 1011 | asUfsuuuGf | 1371 | TCTTTACCTT | 1731 |
| 1422370 | uAfGfCfacc | | aGfGfugcuA | | AGCACCTCAA | |
| | ucaaaauL96 | | faGfguaaas | | AAT | |
| | | | gsa | | | |
| AD- | ususagcaCf | 1012 | asAfsuggUf | 1372 | CCTTAGCACC | 1732 |
| 1422376 | cUfCfAfaaa | | aUfUfuugaG | | TCAAAATACC | |
| | uaccauuL96 | | fgUfgcuaas | | ATG | |
| | | | gsg | | | |
| AD- | csuscaaaAf | 1013 | asAfsaauGf | 1373 | ACCTCAAAAT | 1733 |
| 1422383 | uAfCfCfaug | | gCfAfugguA | | ACCATGCCAT | |
| | ccauuuuL96 | | fuUfuugags | | TTA | |
| | | | gsu | | | |
| AD- | usasccauGf | 1014 | asAfsagcUf | 1374 | AATACCATGC | 1734 |
| 1422390 | cCfAfUfuua | | uUfAfaaugG | | CATTTAAAGC | |
| | aagcuuuL96 | | fcAfugguas | | TTA | |
| | | | usu | | | |
| AD- | ususuucaUf | 1015 | asCfsaguUf | 1375 | TGTTTTCATT | 1735 |
| 1422412 | uAfUfCfuca | | uUfGfagauA | | ATCTCAAAAC | |
| | aaacuguL96 | | faUfgaaaas | | TGC | |
| | | | csa | | | |
| AD- | uscsucaaAf | 1016 | asUfsugaCf | 1376 | TATCTCAAAA | 1736 |
| 1422421 | aCfUfGfcac | | aGfUfgcagU | | CTGCACTGTC | |
| | ugucaauL96 | | fuUfugagas | | AAG | |
| | | | usa | | | |
| AD- | csusgcacUf | 1017 | asUfscauCf | 1377 | AACTGCACTG | 1737 |
| 1422429 | gUfCfAfaga | | aUfCfuugaC | | TCAAGATGAT | |
| | ugaugauL96 | | faGfugcags | | GAT | |
| | | | usu | | | |
| AD- | csasagauGf | 1018 | asUfsaaaGf | 1378 | GTCAAGATGA | 1738 |
| 1422438 | aUfGfAfuga | | aUfCfaucaU | | TGATGATCTT | |
| | ucuuuauL96 | | fcAfucuugs | | TAA | |
| | | | aSC | | | |
| AD- | gsasucuuUf | 1019 | asGfsaguGf | 1379 | ATGATCTTTA | 1739 |
| 1422449 | aAfAfAfuac | | uGfUfauuuU | | AAATACACAC | |
| | acacucuL96 | | faAfagaucs | | TCA | |
| | | | asu | | | |
| AD- | asasauacAf | 1020 | asCfsuugAf | 1380 | TAAAATACAC | 1740 |
| 1422457 | cAfCfUfcaa | | uUfUfgaguG | | ACTCAAATCA | |
| | aucaaguL96 | | fuGfuauuus | | AGA | |
| | | | usa | | | |
| AD- | ascsucaaAf | 1021 | asUfsuaaGf | 1381 | ACACTCAAAT | 1741 |
| 1422465 | uCfAfAfgaa | | uUfUfcuugA | | CAAGAAACTT | |
| | acuuaauL96 | | fuUfugagus | | AAG | |
| | | | gsu | | | |
| AD- | asuscaagAf | 1022 | asGfsuaaCf | 1382 | AAATCAAGAA | 1742 |
| 1422471 | aAfCfUfuaa | | cUfUfaaguU | | ACTTAAGGTT | |
| | gguuacuL96 | | fuCfuugaus | | ACC | |
| | | | usu | | | |
| AD- | ascsuuaaGf | 1023 | asGfsaacAf | 1383 | AAACTTAAGG | 1743 |
| 1422479 | gUfUfAfccu | | aAfGfguaaC | | TTACCTTTGT | |
| | uuguucuL96 | | fcUfuaagus | | TCC | |
| | | | usu | | | |
| AD- | ascscuuuGf | 1024 | asUfsgaaAf | 1384 | TTACCTTTGT | 1744 |
| 1422489 | uUfCfCfcaa | | uUfUfgggaA | | TCCCAAATTT | |
| | auuucauL96 | | fcAfaaggus | | CAT | |
| | | | asa | | | |
| AD- | gsusucccAf | 1025 | asUfsaggUf | 1385 | TTGTTCCCAA | 1745 |
| 1422495 | aAfUfUfuca | | aUfGfaaauU | | ATTTCATACC | |
| | uaccuauL96 | | fuGfggaacs | | TAT | |
| | | | asa | | | |
| AD- | asasauuuCf | 1026 | asAfsgauGf | 1386 | CCAAATTTCA | 1746 |
| 1422501 | aUfAfCfcua | | aUfAfgguaU | | TACCTATCAT | |
| | ucaucuuL96 | | fgAfaauuus | | CTT | |
| | | | gsg | | | |
| AD- | asusaccuAf | 1027 | asCfsuacUf | 1387 | TCATACCTAT | 1747 |
| 1422508 | uCfAfUfcuu | | uAfAfgaugA | | CATCTTAAGT | |
| | aaguaguL96 | | fuAfgguaus | | AGG | |
| | | | gsa | | | |
| AD- | csasucuuAf | 1028 | asAfsgaaGf | 1388 | ATCATCTTAA | 1748 |
| 1422516 | aGfUfAfggg | | uCfCfcuacU | | GTAGGGACTT | |
| | acuucuuL96 | | fuAfagaugs | | CTG | |
| | | | asu | | | |
| AD- | asgsggacUf | 1029 | asUfsuguGf | 1389 | GTAGGGACTT | 1749 |
| 1422526 | uCfUfGfucu | | aAfGfacagA | | CTGTCTTCAC | |
| | ucacaauL96 | | faGfucccus | | AAC | |
| | | | asc | | | |
| AD- | usgsucuuCf | 1030 | asAfsauaAf | 1390 | TCTGTCTTCA | 1750 |
| 1422535 | aCfAfAfcag | | uCfUfguugU | | CAACAGATTA | |
| | auuauuuL96 | | fgAfagacas | | TTA | |
| | | | gsa | | | |
| AD- | ascsaacaGf | 1031 | asGfsuaaGf | 1391 | TCACAACAGA | 1751 |
| 1422542 | aUfUfAfuua | | gUfAfauaaU | | TTATTACCTT | |
| | ccuuacuL96 | | fcUfguugus | | ACA | |
| | | | gsa | | | |
| AD- | asusuauuAf | 1032 | asAfsacuUf | 1392 | AGATTATTAC | 1752 |
| 1422549 | cCfUfUfaca | | cUfGfuaagG | | CTTACAGAAG | |
| | gaaguuuL96 | | fuAfauaaus | | TTT | |
| | | | csu | | | |
| AD- | ascscuuaCf | 1033 | asAfsauuCf | 1393 | TTACCTTACA | 1753 |
| 1422555 | aGfAfAfguu | | aAfAfcuucU | | GAAGTTTGAA | |
| | ugaauuuL96 | | fgUfaaggus | | TTA | |
| | | | asa | | | |
| AD- | asgsaaguUf | 1034 | asAfsccgGf | 1394 | ACAGAAGTTT | 1754 |
| 1422562 | uGfAfAfuua | | aUfAfauucA | | GAATTATCCG | |
| | uccgguuL96 | | faAfcuucus | | GTC | |
| | | | gsu | | | |
| AD- | ususgaauUf | 1035 | asAfsaccCf | 1395 | GTTTGAATTA | 1755 |
| 1422568 | aUfCfCfggu | | gAfCfcggaU | | TCCGGTCGGG | |
| | cggguuuL96 | | faAfuucaas | | TTT | |
| | | | aSC | | | |
| AD- | asusccggUf | 1036 | asAfscaaUf | 1396 | TTATCCGGTC | 1756 |
| 1422575 | cGfGfGfuuu | | aAfAfacccG | | GGGTTTTATT | |
| | uauuguuL96 | | faCfcggaus | | GTT | |
| | | | asa | | | |
| AD- | uscsggguUf | 1037 | asUfsuuuAf | 1397 | GGTCGGGTTT | 1757 |
| 1422581 | uUfAfUfugu | | aAfCfaauaA | | TATTGTTTAA | |
| | uuaaaauL96 | | faAfcccgas | | AAT | |
| | | | cSC | | | |
| AD- | ususuaaaAf | 1038 | asGfsaugCf | 1398 | TGTTTAAAAT | 1758 |
| 1422586 | uCfAfUfuuc | | aGfAfaaugA | | CATTTCTGCA | |
| | ugcaucuL96 | | fuUfuuaaas | | TCA | |
| | | | csa | | | |
| AD- | uscsauuuCf | 1039 | asAfsgcaGf | 1399 | AATCATTTCT | 1759 |
| 1422593 | uGfCfAfuca | | cUfGfaugcA | | GCATCAGCTG | |
| | gcugcuuL96 | | fgAfaaugas | | CTG | |
| | | | usu | | | |
| AD- | csusgcauCf | 1040 | asUfsguuUf | 1400 | TTCTGCATCA | 1760 |
| 1422599 | aGfCfUfgcu | | cAfGfcagcU | | GCTGCTGAAA | |
| | gaaacauL96 | | fgAfugcags | | CAA | |
| | | | asa | | | |
| AD- | csasgcugCf | 1041 | asAfsuuuGf | 1401 | ATCAGCTGCT | 1761 |
| 1422605 | uGfAfAfaca | | uUfGfuuucA | | GAAACAACAA | |
| | acaaauuL96 | | fgCfagcugs | | ATA | |
| | | | asu | | | |
| AD- | asasacaaCf | 1042 | asAfscaaUf | 1402 | TGAAACAACA | 1762 |
| 1422614 | aAfAfUfagg | | uCfCfuauuU | | AATAGGAATT | |
| | aauuguuL96 | | fgUfuguuus | | GTT | |
| | | | csa | | | |
| AD- | asgsgaauUf | 1043 | asCfscucCf | 1403 | ATAGGAATTG | 1763 |
| 1422623 | gUfUfUfuua | | aUfAfaaaaC | | TTTTTATGGA | |
| | uggagguL96 | | faAfuuccus | | GGC | |
| | | | asu | | | |
| AD- | gsusuuuuAf | 1044 | asUfsgcaAf | 1404 | TTGTTTTTAT | 1764 |
| 1422630 | uGfGfAfggc | | aGfCfcuccA | | GGAGGCTTTG | |
| | uuugcauL96 | | fuAfaaaacs | | CAT | |
| | | | asa | | | |
| AD- | asgsgcuuUf | 1045 | asAfsgggAf | 1405 | GGAGGCTTTG | 1765 |
| 1422640 | gCfAfUfaga | | aUfCfuaugC | | CATAGATTCC | |
| | uucccuuL96 | | faAfagccus | | CTG | |
| | | | CSC | | | |
| AD- | usgscauaGf | 1046 | asCfsugcUf | 1406 | TTTGCATAGA | 1766 |
| 1422646 | aUfUfCfccu | | cAfGfggaaU | | TTCCCTGAGC | |
| | gagcaguL96 | | fcUfaugcas | | AGG | |
| | | | asa | | | |
| AD- | asusucccUf | 1047 | asUfsaaaAf | 1407 | AGATTCCCTG | 1767 |
| 1422653 | gAfGfCfagg | | uCfCfugcuC | | AGCAGGATTT | |
| | auuuuauL96 | | faGfggaaus | | TAA | |
| | | | csu | | | |
| AD- | usgsagcaGf | 1048 | asAfsaagAf | 1408 | CCTGAGCAGG | 1768 |
| 1422659 | gAfUfUfuua | | uUfAfaaauC | | ATTTTAATCT | |
| | aucuuuuL96 | | fcUfgcucas | | TTT | |
| | | | gsg | | | |
| AD- | usasaucuUf | 1049 | asGfsuccAf | 1409 | TTTAATCTTT | 1769 |
| 1422667 | uUfUfCfuaa | | gUfUfagaaA | | TTCTAACTGG | |
| | cuggacuL96 | | faAfgauuas | | ACT | |
| | | | asa | | | |
| AD- | uscsuaacUf | 1050 | asUfsuugAf | 1410 | TTTCTAACTG | 1770 |
| 1422676 | gGfAfCfugg | | aCfCfagucC | | GACTGGTTCA | |
| | uucaaauL96 | | faGfuuagas | | AAT | |
| | | | asa | | | |
| AD- | gsgsacugGf | 1051 | asAfsacaAf | 1411 | CTGGACTGGT | 1771 |
| 1422683 | uUfCfAfaau | | cAfUfuugaA | | TCAAATGTTG | |
| | guuguuuL96 | | fcCfaguccs | | TTC | |
| | | | asg | | | |
| AD- | asasauguUf | 1052 | asUfsaaaGf | 1412 | TCAAATGTTG | 1772 |
| 1422693 | gUfUfCfucu | | aAfGfagaaC | | TTCTCTTCTT | |
| | ucuuuauL96 | | faAfcauuus | | TAA | |
| | | | gsa | | | |
| AD- | ususcucuUf | 1053 | asCfsaucCf | 1413 | TGTTCTCTTC | 1773 |
| 1422701 | cUfUfUfaaa | | cUfUfuaaaG | | TTTAAAGGGA | |
| | gggauguL96 | | faAfgagaas | | TGG | |
| | | | csa | | | |
| AD- | csusuuaaAf | 1054 | asAfsucuUf | 1414 | TTCTTTAAAG | 1774 |
| 1422708 | gGfGfAfugg | | gCfCfauccC | | GGATGGCAAG | |
| | caagauuL96 | | fuUfuaaags | | ATG | |
| | | | asa | | | |
| AD- | gsgscaagAf | 1055 | asAfsucaCf | 1415 | ATGGCAAGAT | 1775 |
| 1422720 | uGfUfGfggc | | uGfCfccacA | | GTGGGCAGTG | |
| | agugauuL96 | | fuCfuugccs | | ATG | |
| | | | asu | | | |
| AD- | usgsggcaGf | 1056 | asCfscuaGf | 1416 | TGTGGGCAGT | 1776 |
| 1422729 | uGfAfUfguc | | uGfAfcaucA | | GATGTCACTA | |
| | acuagguL96 | | fcUfgcccas | | GGG | |
| | | | csa | | | |
| AD- | gsgsgacaGf | 1057 | asAfsaucCf | 1417 | CAGGGACAGG | 1777 |
| 1422752 | gAfUfAfaga | | cUfCfuuauC | | ATAAGAGGGA | |
| | gggauuuL96 | | fcUfgucccs | | TTA | |
| | | | usg | | | |
| AD- | gsgsauaaGf | 1058 | asCfsuccCf | 1418 | CAGGATAAGA | 1778 |
| 1422758 | aGfGfGfauu | | uAfAfucccU | | GGGATTAGGG | |
| | agggaguL96 | | fcUfuauces | | AGA | |
| | | | usg | | | |
| AD- | asgsggauUf | 1059 | asAfsucuUf | 1419 | AGAGGGATTA | 1779 |
| 1422765 | aGfGfGfaga | | cUfCfucccU | | GGGAGAGAAG | |
| | gaagauuL96 | | faAfucccus | | ATA | |
| | | | csu | | | |
| AD- | usasgggaGf | 1060 | asCfscugCf | 1420 | ATTAGGGAGA | 1780 |
| 1422771 | aGfAfAfgau | | uAfUfcuucU | | GAAGATAGCA | |
| | agcagguL96 | | fcUfcccuas | | GGG | |
| | | | asu | | | |
| AD- | csusgggaAf | 1061 | asGfscuuGf | 1421 | GGCTGGGAAC | 1781 |
| 1422797 | cCfCfAfagu | | gAfCfuuggG | | CCAAGTCCAA | |
| | ccaagcuL96 | | fuUfcccags | | GCA | |
| | | | CSC | | | |
| AD- | ascsccaaGf | 1062 | asUfsgguAf | 1422 | GAACCCAAGT | 1782 |
| 1422803 | uCfCfAfagc | | uGfCfuuggA | | CCAAGCATAC | |
| | auaccauL96 | | fcUfugggus | | CAA | |
| | | | usc | | | |
| AD- | gsusccaaGf | 1063 | asUfscguGf | 1423 | AAGTCCAAGC | 1783 |
| 1422809 | cAfUfAfcca | | uUfGfguauG | | ATACCAACAC | |
| | acacgauL96 | | fcUfuggacs | | GAG | |
| | | | usu | | | |
| AD- | csasacacGf | 1064 | asAfscagUf | 1424 | ACCAACACGA | 1784 |
| 1422821 | aGfCfAfggc | | aGfCfcugcU | | GCAGGCTACT | |
| | uacuguuL96 | | fcGfuguugs | | GTC | |
| | | | gsu | | | |
| AD- | gsasgcagGf | 1065 | asGfsagcUf | 1425 | ACGAGCAGGC | 1785 |
| 1422827 | cUfAfCfugu | | gAfCfaguaG | | TACTGTCAGC | |
| | cagcucuL96 | | fcCfugcucs | | TCC | |
| | | | gsu | | | |
| AD- | csgsgagaAf | 1066 | asCfsuguGf | 1426 | CTCGGAGAAG | 1786 |
| 1422831 | gAfGfCfugu | | aAfCfagcuC | | AGCTGTTCAC | |
| | ucacaguL96 | | fuUfcuccgs | | AGC | |
| | | | asg | | | |
| AD- | gsasgcugUf | 1067 | asAfsgucUf | 1427 | AAGAGCTGTT | 1787 |
| 1422838 | uCfAfCfagc | | gGfCfugugA | | CACAGCCAGA | |
| | cagacuuL96 | | faCfagcucs | | CTG | |
| | | | usu | | | |
| AD- | ascsagccAf | 1068 | asAfsacuGf | 1428 | TCACAGCCAG | 1788 |
| 1422847 | gAfCfUfggc | | uGfCfcaguC | | ACTGGCACAG | |
| | acaguuuL96 | | fuGfgcugus | | TTT | |
| | | | gsa | | | |
| AD- | usgsgcacAf | 1069 | asUfsuucUf | 1429 | ACTGGCACAG | 1789 |
| 1422857 | gUfUfUfucu | | cAfGfaaaaC | | TTTTCTGAGA | |
| | gagaaauL96 | | fuGfugccas | | AAG | |
| | | | gsu | | | |
| AD- | asgsuuuuCf | 1070 | asAfsuagUf | 1430 | ACAGTTTTCT | 1790 |
| 1422863 | uGfAfGfaaa | | cUfUfucucA | | GAGAAAGACT | |
| | gacuauuL96 | | fgAfaaacus | | ATT | |
| | | | gsu | | | |
| AD- | csusgagaAf | 1071 | asGfsuuuGf | 1431 | TTCTGAGAAA | 1791 |
| 1422869 | aGfAfCfuau | | aAfUfagucU | | GACTATTCAA | |
| | ucaaacuL96 | | fuUfcucags | | ACA | |
| | | | asa | | | |
| AD- | asasgacuAf | 1072 | asGfsagaCf | 1432 | GAAAGACTAT | 1792 |
| 1422875 | uUfCfAfaac | | uGfUfuugaA | | TCAAACAGTC | |
| | agucucuL96 | | fuAfgucuus | | TCA | |
| | | | usc | | | |
| AD- | ususcaaaCf | 1073 | asAfsuuuCf | 1433 | TATTCAAACA | 1793 |
| 1422882 | aGfUfCfuca | | cUfGfagacU | | GTCTCAGGAA | |
| | ggaaauuL96 | | fgUfuugaas | | ATC | |
| | | | usa | | | |
| AD- | gsuscucaGf | 1074 | asCfsauaUf | 1434 | CAGTCTCAGG | 1794 |
| 1422890 | gAfAfAfuca | | uUfGfauuuC | | AAATCAAATA | |
| | aauauguL96 | | fcUfgagacs | | TGC | |
| | | | usg | | | |
| AD- | gsgsaaauCf | 1075 | asGfscuuUf | 1435 | CAGGAAATCA | 1795 |
| 1422896 | aAfAfUfaug | | gCfAfuauuU | | AATATGCAAA | |
| | caaagcuL96 | | fgAfuuuccs | | GCA | |
| | | | usg | | | |
| AD- | csasaauaUf | 1076 | asGfsucaGf | 1436 | ATCAAATATG | 1796 |
| 1422902 | gCfAfAfagc | | uGfCfuuugC | | CAAAGCACTG | |
| | acugacuL96 | | faUfauuugs | | ACT | |
| | | | asu | | | |
| AD- | usgscaaaGf | 1077 | asUfsuagAf | 1437 | TATGCAAAGC | 1797 |
| 1422908 | cAfCfUfgac | | aGfUfcaguG | | ACTGACTTCT | |
| | uucuaauL96 | | fcUfuugcas | | AAG | |
| | | | usa | | | |
| AD- | gscsacugAf | 1078 | asUfsuuuAf | 1438 | AAGCACTGAC | 1798 |
| 1422914 | cUfUfCfuaa | | cUfUfagaaG | | TTCTAAGTAA | |
| | guaaaauL96 | | fuCfagugcs | | AAC | |
| | | | usu | | | |
| AD- | ascsuucuAf | 1079 | asCfsuguGf | 1439 | TGACTTCTAA | 1799 |
| 1422920 | aGfUfAfaaa | | gUfUfuuacU | | GTAAAACCAC | |
| | ccacaguL96 | | fuAfgaagus | | AGC | |
| | | | csa | | | |
| AD- | gsusaaaaCf | 1080 | asUfsucaAf | 1440 | AAGTAAAACC | 1800 |
| 1422928 | cAfCfAfgca | | cUfGfcuguG | | ACAGCAGTTG | |
| | guugaauL96 | | fgUfuuuacs | | AAA | |
| | | | usu | | | |
| AD- | cscsacagCf | 1081 | asAfsgucUf | 1441 | AACCACAGCA | 1801 |
| 1422934 | aGfUfUfgaa | | uUfUfcaacU | | GTTGAAAAGA | |
| | aagacuuL96 | | fgCfuguggs | | CTC | |
| | | | usu | | | |
| AD- | ususgaaaAf | 1082 | asUfsuucUf | 1442 | AGTTGAAAAG | 1802 |
| 1422943 | gAfCfUfcca | | uUfGfgaguC | | ACTCCAAAGA | |
| | aagaaauL96 | | fuUfuucaas | | AAT | |
| | | | csu | | | |
| AD- | asgsacucCf | 1083 | asCfsuuaCf | 1443 | AAAGACTCCA | 1803 |
| 1422949 | aAfAfGfaaa | | aUfUfucuuU | | AAGAAATGTA | |
| | uguaaguL96 | | fgGfagucus | | AGG | |
| | | | usu | | | |
| AD- | asasagaaAf | 1084 | asAfsguuUf | 1444 | CCAAAGAAAT | 1804 |
| 1422955 | uGfUfAfagg | | cCfCfuuacA | | GTAAGGGAAA | |
| | gaaacuuL96 | | fuUfucuuus | | CTG | |
| | | | gsg | | | |
| AD- | asasgggaAf | 1085 | asCfsguuGf | 1445 | GTAAGGGAAA | 1805 |
| 1422965 | aCfUfGfcca | | cUfGfgcagU | | CTGCCAGCAA | |
| | gcaacguL96 | | fuUfcccuus | | CGC | |
| | | | asc | | | |
| AD- | gsusgccaGf | 1086 | asCfscuaUf | 1446 | AGGTGCCAGT | 1806 |
| 1422975 | uUfAfUfggc | | aGfCfcauaA | | TATGGCTATA | |
| | uauagguL96 | | fcUfggcacs | | GGT | |
| | | | csu | | | |
| AD- | asusggcuAf | 1087 | asUfsuugUf | 1447 | TTATGGCTAT | 1807 |
| 1422984 | uAfGfGfugc | | aGfCfaccuA | | AGGTGCTACA | |
| | uacaaauL96 | | fuAfgccaus | | AAA | |
| | | | asa | | | |
| AD- | ascsagcaAf | 1088 | asUfsuucCf | 1448 | ACACAGCAAG | 1808 |
| 1423007 | gGfGfUfgau | | cAfUfcaccC | | GGTGATGGGA | |
| | gggaaauL96 | | fuUfgcugus | | AAG | |
| | | | gsu | | | |
| AD- | gsgsgugaUf | 1089 | asAfscaaUf | 1449 | AAGGGTGATG | 1809 |
| 1423014 | gGfGfAfaag | | gCfUfuuccC | | GGAAAGCATT | |
| | cauuguuL96 | | faUfcacccs | | GTA | |
| | | | usu | | | |
| AD- | usgsggaaAf | 1090 | asAfscauUf | 1450 | GATGGGAAAG | 1810 |
| 1423020 | gCfAfUfugu | | uAfCfaaugC | | CATTGTAAAT | |
| | aaauguuL96 | | fuUfucccas | | GTG | |
| | | | uSC | | | |
| AD- | asgscauuGf | 1091 | asAfsaaaGf | 1451 | AAAGCATTGT | 1811 |
| 1423026 | uAfAfAfugu | | cAfCfauuuA | | AAATGTGCTT | |
| | gcuuuuuL96 | | fcAfaugcus | | TTA | |
| | | | usu | | | |
| AD- | ascsugauGf | 1092 | asCfsuuuCf | 1452 | ATACTGATGT | 1812 |
| 1423035 | uUfCfCfuag | | aCfUfaggaA | | TCCTAGTGAA | |
| | ugaaaguL96 | | fcAfucagus | | AGA | |
| | | | asu | | | |
| AD- | gsusuccuAf | 1093 | asCfsugcCf | 1453 | ATGTTCCTAG | 1813 |
| 1423041 | gUfGfAfaag | | uCfUfuucaC | | TGAAAGAGGC | |
| | aggcaguL96 | | fuAfggaacs | | AGC | |
| | | | asu | | | |
| AD- | gsusgaaaGf | 1094 | asUfsuucAf | 1454 | TAGTGAAAGA | 1814 |
| 1423048 | aGfGfCfagc | | aGfCfugccU | | GGCAGCTTGA | |
| | uugaaauL96 | | fcUfuucacs | | AAC | |
| | | | usa | | | |
| AD- | asgsgcagCf | 1095 | asAfsucuCf | 1455 | AGAGGCAGCT | 1815 |
| 1423055 | uUfGfAfaac | | aGfUfuucaA | | TGAAACTGAG | |
| | ugagauuL96 | | fgCfugccus | | ATG | |
| | | | csu | | | |
| AD- | asasacugAf | 1096 | asAfsuguGf | 1456 | TGAAACTGAG | 1816 |
| 1423065 | gAfUfGfuga | | uUfCfacauC | | ATGTGAACAC | |
| | acacauuL96 | | fuCfaguuus | | ATC | |
| | | | csa | | | |
| AD- | asgsauguGf | 1097 | asAfsagcUf | 1457 | TGAGATGTGA | 1817 |
| 1423071 | aAfCfAfcau | | gAfUfguguU | | ACACATCAGC | |
| | cagcuuuL96 | | fcAfcaucus | | TTG | |
| | | | csa | | | |
| AD- | csasucagCf | 1098 | asUfsuuaAf | 1458 | CACATCAGCT | 1818 |
| 1423082 | uUfGfCfccu | | cAfGfggcaA | | TGCCCTGTTA | |
| | guuaaauL96 | | fgCfugaugs | | AAA | |
| | | | usg | | | |
| AD- | csusugccCf | 1099 | asUfscauCf | 1459 | AGCTTGCCCT | 1819 |
| 1423088 | uGfUfUfaaa | | uUfUfuaacA | | GTTAAAAGAT | |
| | agaugauL96 | | fgGfgcaags | | GAA | |
| | | | csu | | | |
| AD- | gsusaucaCf | 1100 | asCfsaagUf | 1460 | TTGTATCACA | 1820 |
| 1423104 | aAfAfUfcuu | | uAfAfgauuU | | AATCTTAACT | |
| | aacuuguL96 | | fgUfgauacs | | TGA | |
| | | | asa | | | |
| AD- | asasaucuUf | 1101 | asAfscucCf | 1461 | ACAAATCTTA | 1821 |
| 1423111 | aAfCfUfuga | | uUfCfaaguU | | ACTTGAAGGA | |
| | aggaguuL96 | | faAfgauuus | | GTC | |
| | | | gsu | | | |
| AD- | asascuugAf | 1102 | asUfsgcaAf | 1462 | TTAACTTGAA | 1822 |
| 1423118 | aGfGfAfguc | | gGfAfcuccU | | GGAGTCCTTG | |
| | cuugcauL96 | | fuCfaaguus | | CAT | |
| | | | asa | | | |
| AD- | asasggagUf | 1103 | asAfsauuGf | 1463 | TGAAGGAGTC | 1823 |
| 1423124 | cCfUfUfgca | | aUfGfcaagG | | CTTGCATCAA | |
| | ucaauuuL96 | | faCfuccuus | | TTT | |
| | | | csa | | | |
| AD- | uscscuugCf | 1104 | asAfsagaAf | 1464 | AGTCCTTGCA | 1824 |
| 1423130 | aUfCfAfauu | | aAfAfuugaU | | TCAATTTTTC | |
| | uuucuuuL96 | | fgCfaaggas | | TTA | |
| | | | csu | | | |
| AD- | ususauuuCf | 1105 | asCfsacuCf | 1465 | TCTTATTTCA | 1825 |
| 1423138 | aUfUfUfcuu | | aAfAfgaaaU | | TTTCTTTGAG | |
| | ugaguguL96 | | fgAfaauaas | | TGT | |
| | | | gsa | | | |
| AD- | asusuucuUf | 1106 | asAfsuuaAf | 1466 | TCATTTCTTT | 1826 |
| 1423145 | uGfAfGfugu | | gAfCfacucA | | GAGTGTCTTA | |
| | cuuaauuL96 | | faAfgaaaus | | ATT | |
| | | | gsa | | | |
| AD- | ususgaguGf | 1107 | asCfsuuuUf | 1467 | CTTTGAGTGT | 1827 |
| 1423151 | uCfUfUfaau | | aAfUfuaagA | | CTTAATTAAA | |
| | uaaaaguL96 | | fcAfcucaas | | AGA | |
| | | | asg | | | |
| AD- | gsasauauUf | 1108 | asCfscaaGf | 1468 | AAGAATATTT | 1828 |
| 1423158 | uUfAfAfcuu | | gAfAfguuaA | | TAACTTCCTT | |
| | ccuugguL96 | | faAfuauucs | | GGA | |
| | | | usu | | | |
| AD- | ususuaacUf | 1109 | asAfsugaGf | 1469 | ATTTTAACTT | 1829 |
| 1423164 | uCfCfUfugg | | uCfCfaaggA | | CCTTGGACTC | |
| | acucauuL96 | | faGfuuaaas | | ATT | |
| | | | asu | | | |
| AD- | ususccuuGf | 1110 | asUfsuuaAf | 1470 | ACTTCCTTGG | 1830 |
| 1423170 | gAfCfUfcau | | aAfUfgaguC | | ACTCATTTTA | |
| | uuuaaauL96 | | fcAfaggaas | | AAA | |
| | | | gsu | | | |
| AD- | usasuuauUf | 1111 | asGfsuagAf | 1471 | TGTATTATTA | 1831 |
| 1423184 | aUfUfCfcca | | aUfGfggaaU | | TTCCCATTCT | |
| | uucuacuL96 | | faAfuaauas | | ACA | |
| | | | csa | | | |
| AD- | asusucccAf | 1112 | asAfsuagUf | 1472 | TTATTCCCAT | 1832 |
| 1423191 | uUfCfUfaca | | aUfGfuagaA | | TCTACATACT | |
| | uacuauuL96 | | fuGfggaaus | | ATG | |
| | | | asa | | | |
| AD- | csusacauAf | 1113 | asAfsgaaAf | 1473 | TTCTACATAC | 1833 |
| 1423200 | cUfAfUfgga | | uUfCfcauaG | | TATGGAATTT | |
| | auuucuuL96 | | fuAfuguags | | CTC | |
| | | | asa | | | |
| AD- | usgsgaauUf | 1114 | asAfsaugAf | 1474 | TATGGAATTT | 1834 |
| 1423210 | uCfUfCfcca | | cUfGfggagA | | CTCCCAGTCA | |
| | gucauuuL96 | | faAfuuccas | | TTT | |
| | | | usa | | | |
| AD- | cscscaguCf | 1115 | asAfscauUf | 1475 | CTCCCAGTCA | 1835 |
| 1423220 | aUfUfUfaau | | uAfUfuaaaU | | TTTAATAAAT | |
| | aaauguuL96 | | fgAfcugggs | | GTG | |
| | | | asg | | | |
| AD- | csasuuuaAf | 1116 | asGfsaagGf | 1476 | GTCATTTAAT | 1836 |
| 1423226 | uAfAfAfugu | | cAfCfauuuA | | AAATGTGCCT | |
| | gccuucuL96 | | fuUfaaaugs | | TCA | |
| | | | asc | | | |

TABLE 4
Single Dose In Vitro Screen in Hep3B cells

| | DPP4/gapdh | |
|---|---|---|
| | 10 nM | |
| | % of message | |
| Duplex Name | remaining | SD |
| AD-1423226.1 | 31.72 | 7.63 |
| AD-1423220.1 | 29.27 | 4.82 |
| AD-1423210.1 | 31.72 | 3.31 |
| AD-1423200.1 | 36.83 | 5.62 |
| AD-1423191.1 | 25.95 | 7.80 |
| AD-1423184.1 | 18.55 | 6.00 |
| AD-1423170.1 | 23.35 | 0.62 |
| AD-1423164.1 | 26.75 | 7.55 |
| AD-1423158.1 | 21.07 | 5.48 |
| AD-1423151.1 | 26.35 | 6.85 |
| AD-1423145.1 | 32.64 | 6.46 |
| AD-1423138.1 | 31.33 | 3.41 |
| AD-1423130.1 | 31.59 | 5.16 |
| AD-1423124.1 | 36.64 | 6.13 |
| AD-1423118.1 | 30.98 | 6.99 |
| AD-1423111.1 | 31.28 | 5.92 |
| AD-1423104.1 | 27.49 | 7.33 |
| AD-1423088.1 | 34.77 | 5.77 |
| AD-1423082.1 | 32.63 | 6.22 |
| AD-1423071.1 | 26.06 | 9.05 |
| AD-1423065.1 | 25.09 | 1.64 |
| AD-1423055.1 | 39.90 | 7.74 |
| AD-1423048.1 | 31.61 | 2.11 |
| AD-1423041.1 | 40.48 | 1.95 |
| AD-1423035.1 | 24.08 | 5.79 |
| AD-1423026.1 | 21.50 | 3.22 |
| AD-1423020.1 | 28.53 | 1.34 |
| AD-1423014.1 | 30.44 | 6.76 |
| AD-1423007.1 | 55.94 | 5.09 |
| AD-1422984.1 | 26.58 | 1.29 |
| AD-1422975.1 | 46.06 | 1.40 |
| AD-1422965.1 | 41.09 | 1.20 |
| AD-1422955.1 | 32.16 | 7.59 |
| AD-1422949.1 | 32.08 | 7.10 |
| AD-1422943.1 | 30.69 | 1.72 |
| AD-1422934.1 | 31.42 | 9.17 |
| AD-1422928.1 | 36.27 | 4.68 |
| AD-1422920.1 | 36.17 | 1.67 |
| AD-1422914.1 | 29.67 | 2.26 |
| AD-1422908.1 | 30.35 | 3.56 |
| AD-1422902.1 | 28.52 | 13.07 |
| AD-1422896.1 | 39.46 | 7.19 |
| AD-1422890.1 | 44.33 | 7.61 |
| AD-1422882.1 | 41.19 | 8.35 |
| AD-1422875.1 | 36.63 | 6.25 |
| AD-1422869.1 | 28.47 | 13.18 |
| AD-1422863.1 | 21.57 | 4.62 |
| AD-1422857.1 | 28.02 | 5.10 |
| AD-1422847.1 | 29.60 | 5.85 |
| AD-1422838.1 | 29.57 | 4.99 |
| AD-1422831.1 | 56.78 | 3.04 |
| AD-1422827.1 | 63.30 | 7.05 |
| AD-1422821.1 | 39.76 | 6.18 |
| AD-1422809.1 | 39.55 | 3.10 |
| AD-1422803.1 | 38.64 | 3.84 |
| AD-1422797.1 | 78.82 | 10.77 |
| AD-1422771.1 | 31.84 | 1.35 |
| AD-1422765.1 | 43.35 | 6.12 |
| AD-1422758.1 | 50.27 | 6.83 |
| AD-1422752.1 | 26.61 | 1.45 |
| AD-1422729.1 | 41.20 | 1.95 |
| AD-1422720.1 | 36.03 | 7.18 |
| AD-1422708.1 | 29.12 | 3.91 |
| AD-1422701.1 | 82.63 | 6.02 |
| AD-1422693.1 | 25.28 | 6.77 |
| AD-1422683.1 | 27.98 | 6.78 |
| AD-1422676.1 | 23.80 | 3.46 |
| AD-1422667.1 | 45.32 | 7.75 |
| AD-1422659.1 | 28.75 | 2.80 |
| AD-1422653.1 | 37.23 | 6.23 |
| AD-1422646.1 | 52.85 | 6.50 |
| AD-1422640.1 | 43.45 | 1.83 |
| AD-1422630.1 | 35.48 | 2.20 |
| AD-1422623.1 | 40.08 | 3.43 |
| AD-1422614.1 | 34.75 | 1.17 |
| AD-1422605.1 | 39.91 | 4.30 |
| AD-1422599.1 | 33.81 | 1.32 |
| AD-1422593.1 | 43.14 | 8.35 |
| AD-1422586.1 | 31.37 | 1.09 |
| AD-1422581.1 | 27.20 | 0.94 |
| AD-1422575.1 | 33.87 | 2.87 |
| AD-1422568.1 | 29.13 | 4.95 |
| AD-1422562.1 | 36.35 | 10.06 |
| AD-1422555.1 | 23.75 | 5.19 |
| AD-1422549.1 | 44.06 | 6.46 |
| AD-1422542.1 | 28.37 | 5.26 |
| AD-1422535.1 | 19.38 | 2.20 |
| AD-1422526.1 | 22.01 | 2.32 |
| AD-1422516.1 | 24.66 | 7.45 |
| AD-1422508.1 | 29.11 | 6.12 |
| AD-1422501.1 | 34.77 | 4.49 |
| AD-1422495.1 | 33.35 | 2.70 |
| AD-1422489.1 | 31.67 | 1.41 |
| AD-1422479.1 | 25.42 | 6.08 |
| AD-1422471.1 | 28.09 | 5.38 |
| AD-1422465.1 | 39.17 | 9.32 |
| AD-1422457.1 | 23.84 | 4.08 |
| AD-1422449.1 | 51.53 | 4.60 |
| AD-1422438.1 | 19.92 | 2.02 |
| AD-1422429.1 | 24.57 | 8.22 |
| AD-1422421.1 | 32.40 | 2.36 |
| AD-1422412.1 | 30.15 | 3.24 |
| AD-1422390.1 | 14.76 | 5.87 |
| AD-1422383.1 | 15.65 | 2.67 |
| AD-1422376.1 | 20.33 | 4.52 |
| AD-1422370.1 | 19.73 | 9.11 |
| AD-1422363.1 | 28.27 | 8.02 |
| AD-1422357.1 | 12.88 | 3.99 |
| AD-1422346.1 | 11.55 | 3.01 |
| AD-1422340.1 | 13.94 | 3.97 |
| AD-1422334.1 | 11.30 | 1.22 |
| AD-1422322.1 | 14.64 | 2.01 |
| AD-1422316.1 | 20.29 | 2.49 |
| AD-1422310.1 | 11.77 | 2.05 |
| AD-1422302.1 | 31.03 | 5.57 |
| AD-1422295.1 | 17.32 | 4.62 |
| AD-1422288.1 | 18.00 | 2.68 |
| AD-1422280.1 | 25.96 | 6.06 |
| AD-1422274.1 | 13.28 | 2.40 |
| AD-1422267.1 | 13.71 | 3.21 |
| AD-1422259.1 | 20.54 | 2.15 |
| AD-1422248.1 | 15.71 | 4.65 |
| AD-1422242.1 | 28.38 | 4.27 |
| AD-1422234.1 | 15.61 | 3.63 |
| AD-1422227.1 | 19.98 | 3.74 |
| AD-1422220.1 | 20.33 | 6.27 |
| AD-1422211.1 | 24.56 | 5.62 |
| AD-1422205.1 | 15.77 | 3.10 |
| AD-1422198.1 | 19.38 | 2.76 |
| AD-1422192.1 | 12.65 | 1.56 |
| AD-1422183.1 | 12.71 | 4.48 |
| AD-1422176.1 | 13.21 | 1.00 |
| AD-1422169.1 | 13.44 | 3.39 |
| AD-1422161.1 | 13.30 | 2.25 |
| AD-1422151.1 | 12.21 | 2.46 |
| AD-1422145.1 | 26.52 | 4.50 |
| AD-1422133.1 | 16.04 | 8.66 |
| AD-1422127.1 | 14.04 | 3.83 |
| AD-1422120.1 | 13.57 | 3.58 |
| AD-1422114.1 | 13.73 | 2.07 |
| AD-1422103.1 | 11.00 | 1.91 |
| AD-1422096.1 | 72.66 | 17.01 |
| AD-1422088.1 | 73.54 | 24.59 |
| AD-1422081.1 | 69.56 | 11.57 |
| AD-1422075.1 | 17.42 | 2.41 |
| AD-1422067.1 | 11.99 | 2.64 |
| AD-1422057.1 | 14.87 | 3.76 |
| AD-1422021.1 | 25.21 | 3.49 |
| AD-1422014.1 | 18.29 | 8.47 |
| AD-1422005.1 | 23.11 | 3.78 |
| AD-1421979.1 | 20.07 | 2.75 |
| AD-1421968.1 | 14.50 | 1.28 |
| AD-1421961.1 | 12.64 | 0.39 |
| AD-1421954.1 | 19.38 | 3.50 |
| AD-1421948.1 | 70.81 | 4.46 |
| AD-1421925.1 | 13.75 | 2.26 |
| AD-1421917.1 | 11.82 | 1.12 |
| AD-1421909.1 | 16.21 | 3.14 |
| AD-1421903.1 | 18.51 | 5.75 |
| AD-1421897.1 | 12.06 | 0.76 |
| AD-1421891.1 | 10.55 | 2.78 |
| AD-1421884.1 | 13.87 | 3.75 |
| AD-1421874.1 | 10.07 | 0.55 |
| AD-1421865.1 | 9.70 | 2.80 |
| AD-1421857.1 | 10.87 | 0.51 |
| AD-1421850.1 | 14.24 | 4.79 |
| AD-1421839.1 | 12.29 | 1.44 |
| AD-1421830.1 | 33.38 | 3.95 |
| AD-1421823.1 | 20.44 | 3.49 |
| AD-1421815.1 | 10.07 | 1.88 |
| AD-1421807.1 | 10.50 | 1.92 |
| AD-1421800.1 | 9.07 | 1.24 |
| AD-1421791.1 | 33.44 | 2.58 |
| AD-1421778.1 | 101.20 | 6.26 |
| AD-1421771.1 | 28.03 | 8.15 |
| AD-1421765.1 | 15.33 | 2.31 |
| AD-1421722.1 | 11.63 | 2.67 |
| AD-1421712.1 | 11.35 | 0.62 |
| AD-1421706.1 | 8.02 | 1.39 |
| AD-1421697.1 | 9.85 | 5.35 |
| AD-1421691.1 | 15.44 | 2.96 |
| AD-1421685.1 | 14.77 | 0.73 |
| AD-1421679.1 | 23.75 | 2.14 |
| AD-1421672.1 | 21.93 | 2.43 |
| AD-1421662.1 | 19.00 | 2.90 |
| AD-1421650.1 | 13.58 | 2.04 |
| AD-1421635.1 | 23.02 | 3.45 |
| AD-1421629.1 | 39.45 | 11.25 |
| AD-1421620.1 | 12.10 | 3.05 |
| AD-1421612.1 | 14.64 | 0.82 |
| AD-1421604.1 | 28.39 | 3.23 |
| AD-1421596.1 | 93.27 | 8.93 |
| AD-1421587.1 | 120.46 | 7.86 |
| AD-1421578.1 | 26.40 | 3.70 |
| AD-1421570.1 | 19.72 | 3.30 |
| AD-1421563.1 | 37.63 | 11.47 |
| AD-1421546.1 | 18.17 | 4.96 |
| AD-1421538.1 | 18.32 | 4.89 |
| AD-1421530.1 | 22.91 | 5.92 |
| AD-1421521.1 | 22.67 | 4.72 |
| AD-1421511.1 | 11.49 | 0.62 |
| AD-1421505.1 | 11.36 | 0.79 |
| AD-1421499.1 | 17.02 | 4.93 |
| AD-1421490.1 | 51.26 | 13.23 |
| AD-1421480.1 | 20.05 | 4.84 |
| AD-1421468.1 | 24.89 | 8.78 |
| AD-1421459.1 | 12.33 | 0.74 |
| AD-1421451.1 | 8.13 | 2.54 |
| AD-1421441.1 | 15.12 | 3.67 |
| AD-1421433.1 | 13.02 | 1.12 |
| AD-1421428.1 | 14.47 | 4.68 |
| AD-1421414.1 | 60.23 | 2.33 |
| AD-1421408.1 | 77.26 | 16.60 |
| AD-1421394.1 | 14.24 | 2.01 |
| AD-1421389.1 | 10.31 | 1.92 |
| AD-1421383.1 | 11.46 | 3.18 |
| AD-1421375.1 | 12.72 | 2.99 |
| AD-1421368.1 | 11.71 | 1.20 |
| AD-1421362.1 | 13.16 | 2.02 |
| AD-1421356.1 | 76.99 | 16.28 |
| AD-1421348.1 | 17.94 | 1.14 |
| AD-1421341.1 | 20.71 | 2.33 |
| AD-1421335.1 | 11.72 | 3.82 |
| AD-1421327.1 | 18.69 | 5.29 |
| AD-1421320.1 | 9.85 | 2.27 |
| AD-1421313.1 | 10.12 | 2.58 |
| AD-1421304.1 | 13.02 | 2.21 |
| AD-1421294.1 | 76.74 | 14.59 |
| AD-1421285.1 | 13.65 | 1.27 |
| AD-1421278.1 | 11.40 | 1.86 |
| AD-1421271.1 | 10.15 | 1.70 |
| AD-1421265.1 | 23.39 | 1.18 |
| AD-1421259.1 | 16.94 | 2.15 |
| AD-1421253.1 | 12.84 | 2.57 |
| AD-1421245.1 | 13.52 | 2.70 |
| AD-1421237.1 | 13.85 | 2.00 |
| AD-1421231.1 | 36.29 | 9.24 |
| AD-1421222.1 | 40.69 | 9.45 |
| AD-1421212.1 | 15.10 | 1.56 |
| AD-1421206.1 | 40.49 | 16.01 |
| AD-1421197.1 | 20.54 | 4.32 |
| AD-1421191.1 | 78.18 | 14.40 |
| AD-1421183.1 | 33.99 | 3.26 |
| AD-1421177.1 | 20.84 | 5.12 |
| AD-1421169.1 | 16.90 | 4.17 |
| AD-1421160.1 | 15.92 | 3.67 |
| AD-1421153.1 | 19.27 | 3.28 |
| AD-1421147.1 | 19.75 | 9.46 |
| AD-1421141.1 | 11.66 | 2.25 |
| AD-1421132.1 | 14.46 | 2.93 |
| AD-1421126.1 | 11.23 | 2.29 |
| AD-1421120.1 | 15.36 | 4.05 |
| AD-1421104.1 | 21.65 | 4.16 |
| AD-1421098.1 | 49.65 | 9.10 |
| AD-1421092.1 | 14.87 | 2.35 |
| AD-1421086.1 | 89.72 | 8.51 |
| AD-1421073.1 | 15.86 | 6.70 |
| AD-1421067.1 | 32.97 | 6.33 |
| AD-1421063.1 | 15.66 | 1.05 |
| AD-1421055.1 | 14.75 | 5.93 |
| AD-1421047.1 | 16.41 | 1.30 |
| AD-1421041.1 | 18.91 | 1.87 |
| AD-1421035.1 | 14.75 | 2.01 |
| AD-1421028.1 | 12.11 | 0.61 |
| AD-1421021.1 | 20.91 | 3.10 |
| AD-1421015.1 | 30.93 | 1.66 |
| AD-1421004.1 | 10.45 | 2.37 |
| AD-1420998.1 | 21.45 | 2.19 |
| AD-1420987.1 | 12.39 | 1.32 |
| AD-1420980.1 | 13.05 | 2.23 |
| AD-1420974.1 | 13.84 | 2.67 |
| AD-1420954.1 | 24.16 | 3.61 |
| AD-1420945.1 | 63.15 | 4.25 |
| AD-1420936.1 | 76.25 | 10.41 |
| AD-1420929.1 | 19.07 | 2.46 |
| AD-1420921.1 | 15.86 | 2.28 |
| AD-1420910.1 | 18.99 | 3.71 |
| AD-1420901.1 | 19.16 | 2.86 |
| AD-1420893.1 | 12.13 | 1.48 |
| AD-1420887.1 | 12.94 | 1.51 |
| AD-1420878.1 | 14.43 | 1.33 |
| AD-1420871.1 | 54.59 | 7.92 |
| AD-1420864.1 | 13.07 | 3.59 |
| AD-1420861.1 | 38.73 | 6.37 |
| AD-1420853.1 | 31.11 | 6.33 |
| AD-1420841.1 | 22.36 | 4.10 |
| AD-1420831.1 | 40.40 | 7.82 |
| AD-1420824.1 | 26.73 | 6.20 |
| AD-1420818.1 | 17.89 | 1.97 |
| AD-1420812.1 | 16.19 | 1.52 |
| AD-1420804.1 | 12.41 | 3.57 |
| AD-1420797.1 | 18.05 | 3.41 |
| AD-1420792.1 | 30.19 | 6.85 |
| AD-1420786.1 | 18.71 | 3.01 |
| AD-1420779.1 | 13.61 | 2.87 |
| AD-1420773.1 | 18.23 | 5.26 |
| AD-1420759.1 | 15.01 | 4.78 |
| AD-1420749.1 | 34.39 | 9.85 |
| AD-1420741.1 | 20.90 | 4.50 |
| AD-1420734.1 | 123.47 | 7.30 |
| AD-1420725.1 | 16.87 | 2.44 |
| AD-1420717.1 | 91.62 | 9.65 |
| AD-1420707.1 | 40.75 | 9.66 |
| AD-1420698.1 | 25.40 | 7.98 |
| AD-1420691.1 | 11.48 | 3.32 |
| AD-1420682.1 | 16.21 | 3.85 |
| AD-1420675.1 | 20.50 | 4.55 |
| AD-1420668.1 | 13.48 | 1.78 |
| AD-1420662.1 | 50.45 | 5.34 |
| AD-1420658.1 | 9.89 | 0.91 |
| AD-1420652.1 | 9.32 | 0.86 |
| AD-1420646.1 | 15.80 | 1.14 |
| AD-1420640.1 | 21.40 | 2.55 |
| AD-1420628.1 | 28.23 | 5.24 |
| AD-1420619.1 | 12.60 | 1.42 |
| AD-1420611.1 | 18.01 | 3.79 |
| AD-1420601.1 | 12.59 | 2.96 |
| AD-1420593.1 | 16.84 | 3.47 |
| AD-1420576.1 | 12.69 | 1.16 |
| AD-1420569.1 | 17.64 | 1.38 |
| AD-1420563.1 | 12.33 | 1.05 |
| AD-1420557.1 | 14.90 | 0.86 |
| AD-1420549.1 | 16.83 | 0.52 |
| AD-1420543.1 | 16.96 | 0.98 |
| AD-1420534.1 | 30.57 | 1.91 |
| AD-1420524.1 | 12.37 | 3.58 |
| AD-1420518.1 | 20.23 | 0.87 |
| AD-1420511.1 | 13.58 | 0.80 |
| AD-1420505.1 | 11.70 | 2.09 |
| AD-1420499.1 | 11.39 | 1.13 |
| AD-1420482.1 | 13.48 | 0.80 |
| AD-1420475.1 | 10.84 | 0.76 |
| AD-1420468.1 | 10.98 | 1.55 |
| AD-1420462.1 | 15.97 | 1.70 |
| AD-1420455.1 | 15.87 | 1.44 |
| AD-1420446.1 | 17.53 | 1.32 |
| AD-1420437.1 | 14.51 | 1.55 |
| AD-1420428.1 | 16.87 | 0.83 |
| AD-1420422.1 | 7.33 | 0.38 |
| AD-1420412.1 | 13.72 | 1.09 |
| AD-1420406.1 | 17.74 | 1.82 |
| AD-1420399.1 | 17.05 | 2.77 |
| AD-1420391.1 | 39.47 | 6.95 |
| AD-1420385.1 | 38.65 | 4.89 |
| AD-1420379.1 | 64.26 | 7.42 |
| AD-1420371.1 | 18.14 | 8.24 |
| AD-1420365.1 | 31.18 | 6.14 |
| AD-1420344.1 | 18.74 | 2.84 |
| AD-1420338.1 | 20.64 | 5.13 |
| AD-1420312.1 | 21.11 | 5.23 |
| AD-1420306.1 | 26.09 | 4.12 |
| AD-1420300.1 | 65.83 | 12.87 |
| AD-1420293.1 | 19.10 | 3.35 |
| AD-1420282.1 | 26.70 | 7.82 |
| AD-1420273.1 | 47.33 | 15.01 |
| AD-1420264.1 | 29.98 | 6.11 |
| AD-1420258.1 | 27.37 | 8.81 |
| AD-1420250.1 | 33.47 | 7.33 |
| AD-1420212.1 | 88.80 | 13.95 |
| AD-1420199.1 | 83.67 | 10.15 |

### Example 3. Design, Synthesis and In Vitro Screening of Additional siRNA Duplexes

[0786] Additional siRNAs were designed, synthesized, and prepared using methods known in the art and described above in Example 1.

[0787] The selection of siRNA designs targeting mouse dipeptidyl-peptidase 4 (DPP4) gene (NM_010074.3) were designed using custo R and Python scripts. The mouse NM_010074.3 REFSEQ mRNA has a length of 5268 bases.

[0788] A detailed list of the additional unmodified DPP4 sense and antisense strand nucleotide sequences is shown in Table 5. A detailed list of the modified DPP4 sense and antisense strand nucleotide sequences is shown in Table 6.

[0789] For transfections, cells (ATCC, Manassas, VA) were grown to near confluence at 37° C. in an atmosphere of 5% CO₂ in Eagle's Minimum Essential Medium (Gibco) supplemented with 10% FBS (ATCC) before being released from the plate by trypsinization. Transfection was carried out by adding 7.5 μl of Opti-MEM plus 0.1 μl of Lipofectamine RNAiMax per well (Invitrogen, Carlsbad CA. cat #13778-150) to 2.5 μl of each siRNA duplex to an individual well in a 384-well plate. The mixture was then incubated at room temperature for 15 minutes. Forty μl of complete growth media without antibiotic containing ˜1.5×10⁴ cells were then added to the siRNA mixture. Cells were incubated for 24 hours prior to RNA purification. Single dose experiments were performed at 50, nM, 10 nM, 1 nM, and 0.1 nM final duplex concentration. Single dose experiments were also performed at 10 nM, 1.666667 nM, 0.277778 nM, 0.046296 nM, 0.007716 nM, 0.001286 nM, 0.000214 nM, 3.57E-05 nM, 5.95E-06 nM, or 9.92E-07 nM.

[0790] Total RNA isolation was performed using DYNABEADS. Briefly, cells were lysed in 10 μl of Lysis/Binding Buffer containing 3 μL of beads per well and mixed for 10 minutes on an electrostatic shaker. The washing steps were automated on a Biotek EL406, using a magnetic plate support. Beads were washed (in 3 μL) once in Buffer A, once in Buffer B, and twice in Buffer E, with aspiration steps in between. Following a final aspiration, complete 12 μL RT mixture was added to each well, as described below.

[0791] For cDNA synthesis, a master mix of 1.5 μl 10× Buffer, 0.6 μl 10×dNTPs, 1.5 μl Random primers, 0.75 μl Reverse Transcriptase, 0.75 μl RNase inhibitor and 9.9 μl of H₂O per reaction were added per well. Plates were sealed, agitated for 10 minutes on an electrostatic shaker, and then incubated at 37 degrees C. for 2 hours. Following this, the plates were agitated at 80 degrees C. for 8 minutes.

[0792] RT-qPCR was performed as described above and relative fold change was calculated as described above.

[0793] The results of the transfection assays of the dsRNA agents listed in Tables 5 and 6 in primary mouse hepatocytes at 50 nM, 10 nM, 1 nM, or 0.1 nM are shown in Table 7. The results of the transfection assays of selected dsRNA agents listed in Tables 5 and 6 in primary cynomolgus hepatocytes at at 10 nM, 1.666667 nM, 0.277778 nM nM, 0.046296 nM, 0.007716 nM, 0.001286 nM, 0.000214 nM, 3.57E-05 nM, 5.95E-06 nM, or 9.92E-07 nM are shown in Table 8A and the ICsos are shown in Table 8B.

TABLE 5
Unmodified Sense and Antisense Strand DPP4 dsRNA Sequences

| | | SEQ | Range in | Antisense Sequence | SEQ | Range in |
|---|---|---|---|---|---|---|
| | Sense Sequence | ID | NM_ | | ID | NM_ |
| Duplex Name | 5′ to 3′ | NO: | 010074.3 | 5′ to 3′ | NO: | 010074.3 |
| AD-1285425.1 | AAUGUGCAAUGUCUCUUUUAA | 1837 | 140-160 | UUAAAAGAGACAUUGCACAUUGA | 1882 | 138-160 |
| AD-1285427.1 | UGUGCAAUGUCUCUUUUAGCA | 1838 | 142-162 | UGCUAAAAGAGACAUUGCACAUU | 1883 | 140-162 |
| AD-1285429.1 | UGCAAUGUCUCUUUUAGCAAA | 1839 | 144-164 | UUUGCUAAAAGAGACAUUGCACA | 1884 | 142-164 |
| AD-1286251.1 | CUCCAAACAACACGUUUCUAA | 1840 | 1072-1092 | UUAGAAACGUGUUGUUUGGAGAC | 1885 | 1070-1092 |
| AD-1286252.1 | UCCAAACAACACGUUUCUAGA | 1841 | 1073-1093 | UCUAGAAACGUGUUGUUUGGAGA | 1886 | 1071-1093 |
| AD-1286365.1 | GUGAAUCCAACUGUAAAGUUA | 1842 | 1206-1226 | UAACUUUACAGUUGGAUUCACAG | 1887 | 1204-1226 |
| AD-1286369.1 | AUCCAACUGUAAAGUUCUUUA | 1843 | 1210-1230 | UAAAGAACUUUACAGUUGGAUUC | 1888 | 1208-1230 |
| AD-1286370.1 | UCCAACUGUAAAGUUCUUUAA | 1844 | 1211-1231 | UUAAAGAACUUUACAGUUGGAUU | 1889 | 1209-1231 |
| AD-1286371.1 | CCAACUGUAAAGUUCUUUAUA | 1845 | 1212-1232 | UAUAAAGAACUUUACAGUUGGAU | 1890 | 1210-1232 |
| AD-1286372.1 | CAACUGUAAAGUUCUUUAUUA | 1846 | 1213-1233 | UAAUAAAGAACUUUACAGUUGGA | 1891 | 1211-1233 |
| AD-1286373.1 | AACUGUAAAGUUCUUUAUUGA | 1847 | 1214-1234 | UCAAUAAAGAACUUUACAGUUGG | 1892 | 1212-1234 |
| AD-1286829.1 | GAGGAAGAAAUCUCUAUAAAA | 1848 | 1702-1722 | UUUUAUAGAGAUUUCUUCCUCCU | 1893 | 1700-1722 |
| AD-1287272.1 | GGAAGUUGAAGAUCAAAUUGA | 1849 | 2225-2245 | UCAAUUUGAUCUUCAACUUCCAG | 1894 | 2223-2245 |
| AD-1287273.1 | GAAGUUGAAGAUCAAAUUGAA | 1850 | 2226-2246 | UUCAAUUUGAUCUUCAACUUCCA | 1895 | 2224-2246 |
| AD-1287274.1 | AAGUUGAAGAUCAAAUUGAAA | 1851 | 2227-2247 | UUUCAAUUUGAUCUUCAACUUCC | 1896 | 2225-2247 |
| AD-1287780.1 | AAGACCACAUUUGUUCUCAUA | 1852 | 2751-2771 | UAUGAGAACAAAUGUGGUCUUAA | 1897 | 2749-2771 |
| AD-1287791.1 | UGUUCUCAUUAUCUCAAAAGA | 1853 | 2762-2782 | UCUUUUGAGAUAAUGAGAACAAA | 1898 | 2760-2782 |
| AD-1287792.1 | GUUCUCAUUAUCUCAAAAGUA | 1854 | 2763-2783 | UACUUUUGAGAUAAUGAGAACAA | 1899 | 2761-2783 |
| AD-1287793.1 | UUCUCAUUAUCUCAAAAGUGA | 1855 | 2764-2784 | UCACUUUUGAGAUAAUGAGAACA | 1900 | 2762-2784 |
| AD-1287861.1 | CUGCUUUCUCCAGUUUUACAA | 1856 | 2832-2852 | UUGUAAAACUGGAGAAAGCAGCC | 1901 | 2830-2852 |
| AD-1287908.1 | UUAGAGCAAUUUGGAUUUUCA | 1857 | 2899-2919 | UGAAAAUCCAAAUUGCUCUAAGG | 1902 | 2897-2919 |
| AD-1288171.1 | UUCUGAGAAAGACUAUUCAAA | 1858 | 3234-3254 | UUUGAAUAGUCUUUCUCAGAAAA | 1903 | 3232-3254 |
| AD-1288585.1 | UUAUGUCUUGAAUCAAACUUA | 1859 | 3719-3739 | UAAGUUUGAUUCAAGACAUAACC | 1904 | 3717-3739 |
| AD-1288623.1 | GACACAUUUGUUCAAAGGUUA | 1860 | 3757-3777 | UAACCUUUGAACAAAUGUGUCCA | 1905 | 3755-3777 |
| AD-1288630.1 | UUGUUCAAAGGUUCUUGUUUA | 1861 | 3764-3784 | UAAACAAGAACCUUUGAACAAAU | 1906 | 3762-3784 |
| AD-1288631.1 | UGUUCAAAGGUUCUUGUUUAA | 1862 | 3765-3785 | UUAAACAAGAACCUUUGAACAAA | 1907 | 3763-3785 |
| AD-1288632.1 | GUUCAAAGGUUCUUGUUUAAA | 1863 | 3766-3786 | UUUAAACAAGAACCUUUGAACAA | 1908 | 3764-3786 |
| AD-1288634.1 | UCAAAGGUUCUUGUUUAACUA | 1864 | 3768-3788 | UAGUUAAACAAGAACCUUUGAAC | 1909 | 3766-3788 |
| AD-1288639.1 | GGUUCUUGUUUAACUUGUUAA | 1865 | 3773-3793 | UUAACAAGUUAAACAAGAACCUU | 1910 | 3771-3793 |
| AD-1288640.1 | GUUCUUGUUUAACUUGUUAGA | 1866 | 3774-3794 | UCUAACAAGUUAAACAAGAACCU | 1911 | 3772-3794 |
| AD-1288641.1 | UUCUUGUUUAACUUGUUAGAA | 1867 | 3775-3795 | UUCUAACAAGUUAAACAAGAACC | 1912 | 3773-3795 |
| AD-1288726.1 | GCUUUGGAGAAAUCAAUUAAA | 1868 | 3937-3957 | UUUAAUUGAUUUCUCCAAAGCUA | 1913 | 3935-3957 |
| AD-1288727.1 | CUUUGGAGAAAUCAAUUAACA | 1869 | 3938-3958 | UGUUAAUUGAUUUCUCCAAAGCU | 1914 | 3936-3958 |
| AD-1288728.1 | UUUGGAGAAAUCAAUUAACAA | 1870 | 3939-3959 | UUGUUAAUUGAUUUCUCCAAAGC | 1915 | 3937-3959 |
| AD-1288729.1 | UUGGAGAAAUCAAUUAACAAA | 1871 | 3940-3960 | UUUGUUAAUUGAUUUCUCCAAAG | 1916 | 3938-3960 |
| AD-1288823.1 | CCAGGGUUUUCUGUAUUGUUA | 1872 | 4078-4098 | UAACAAUACAGAAAACCCUGGAA | 1917 | 4076-4098 |
| AD-1288824.1 | CAGGGUUUUCUGUAUUGUUUA | 1873 | 4079-4099 | UAAACAAUACAGAAAACCCUGGA | 1918 | 4077-4099 |
| AD-1288880.1 | UAGCAAUGUUUGGAUAACUUA | 1874 | 4167-4187 | UAAGUUAUCCAAACAUUGCUAAG | 1919 | 4165-4187 |
| AD-1288938.1 | AAUGGACUUCACACAUUUAAA | 1875 | 4238-4258 | UUUAAAUGUGUGAAGUCCAUUUU | 1920 | 4236-4258 |
| AD-1288939.1 | AUGGACUUCACACAUUUAAAA | 1876 | 4239-4259 | UUUUAAAUGUGUGAAGUCCAUUU | 1921 | 4237-4259 |
| AD-1289328.1 | UGUGUUCCUUUUGUUUCUAAA | 1877 | 4723-4743 | UUUAGAAACAAAAGGAACACAAA | 1922 | 4721-4743 |
| AD-1289466.1 | CGUAAGAGUUGUGAAUUAGAA | 1878 | 4875-4895 | UUCUAAUUCACAACUCUUACGGA | 1923 | 4873-4895 |
| AD-1289513.1 | UGAACUCAAGAGUAAGUUUGA | 1879 | 4922-4942 | UCAAACUUACUCUUGAGUUCACU | 1924 | 4920-4942 |
| AD-1289514.1 | GAACUCAAGAGUAAGUUUGAA | 1880 | 4923-4943 | UUCAAACUUACUCUUGAGUUCAC | 1925 | 4921-4943 |
| AD-1289516.1 | ACUCAAGAGUAAGUUUGAAAA | 1881 | 4925-4945 | UUUUCAAACUUACUCUUGAGUUC | 1926 | 4923-4945 |

TABLE 6
Modified Sense and Antisense Strand DPP4 dsRNA Sequences

| | | SEQ | Antisense | SEQ | mRNA target | SEQ |
|---|---|---|---|---|---|---|
| Duplex | Sense Sequence | ID | Sequence | ID | sequence | ID |
| Name | 5′ to 3′ | NO: | 5′ to 3′ | NO: | 5′ to 3′ | NO: |
| AD- | asasugugCfaAfUf | 1927 | VPusUfsaaaAfgAf | 1972 | UCAAUGUGCAAUGUC | 2017 |
| 1285425.1 | GfucucuuuuaaL96 | | GfacauUfgCfacau | | UCUUUUAG | |
| | | | usgsa | | | |
| AD- | usgsugcaAfuGfUf | 1928 | VPusGfscuaAfaAf | 1973 | AAUGUGCAAUGUCUC | 2018 |
| 1285427.1 | CfucuuuuagcaL96 | | GfagacAfuUfgcac | | UUUUAGCA | |
| | | | asusu | | | |
| AD- | usgscaauGfuCfUf | 1929 | VPusUfsugcUfaAf | 1974 | UGUGCAAUGUCUCUU | 2019 |
| 1285429.1 | CfuuuuagcaaaL96 | | AfagagAfcAfuugc | | UUAGCAAA | |
| | | | ascsa | | | |
| AD- | csusccaaAfcAfAf | 1930 | VPusUfsagaAfaCf | 1975 | GUCUCCAAACAACAC | 2020 |
| 1286251.1 | CfacguuucuaaL96 | | GfuguuGfuUfugga | | GUUUCUAG | |
| | | | gsasc | | | |
| AD- | uscscaaaCfaAfCf | 1931 | VPusCfsuagAfaAf | 1976 | UCUCCAAACAACACG | 2021 |
| 1286252.1 | AfcguuucuagaL96 | | CfguguUfgUfuugg | | UUUCUAGC | |
| | | | asgsa | | | |
| AD- | gsusgaauCfcAfAf | 1932 | VPusAfsacuUfuAf | 1977 | CUGUGAAUCCAACUG | 2022 |
| 1286365.1 | CfuguaaaguuaL96 | | CfaguuGfgAfuuca | | UAAAGUUC | |
| | | | csasg | | | |
| AD- | asusccaaCfuGfUf | 1933 | VPusAfsaagAfaCf | 1978 | GAAUCCAACUGUAAA | 2023 |
| 1286369.1 | AfaaguucuuuaL96 | | UfuuacAfgUfugga | | GUUCUUUA | |
| | | | ususc | | | |
| AD- | uscscaacUfgUfAf | 1934 | VPusUfsaaaGfaAf | 1979 | AAUCCAACUGUAAAG | 2024 |
| 1286370.1 | AfaguucuuuaaL96 | | CfuuuaCfaGfuugg | | UUCUUUAU | |
| | | | asusu | | | |
| AD- | cscsaacuGfuAfAf | 1935 | VPusAfsuaaAfgAf | 1980 | AUCCAACUGUAAAGU | 2025 |
| 1286371.1 | AfguucuuuauaL96 | | AfcuuuAfcAfguug | | UCUUUAUU | |
| | | | gsasu | | | |
| AD- | csasacugUfaAfAf | 1936 | VPusAfsauaAfaGf | 1981 | UCCAACUGUAAAGUU | 2026 |
| 1286372.1 | GfuucuuuauuaL96 | | AfacuuUfaCfaguu | | CUUUAUUG | |
| | | | gsgsa | | | |
| AD- | asascuguAfaAfGf | 1937 | VPusCfsaauAfaAf | 1982 | CCAACUGUAAAGUUC | 2027 |
| 1286373.1 | UfucuuuauugaL96 | | GfaacuUfuAfcagu | | UUUAUUGU | |
| | | | usgsg | | | |
| AD- | gsasggaaGfaAfAf | 1938 | VPusUfsuuaUfaGf | 1983 | AGGAGGAAGAAAUCU | 2028 |
| 1286829.1 | UfcucuauaaaaL96 | | AfgauuUfcUfuccu | | CUAUAAAA | |
| | | | cscsu | | | |
| AD- | gsgsaaguUfgAfAf | 1939 | VPusCfsaauUfuGf | 1984 | CUGGAAGUUGAAGAU | 2029 |
| 1287272.1 | GfaucaaauugaL96 | | AfucuuCfaAfcuuc | | CAAAUUGA | |
| | | | csasg | | | |
| AD- | gsasaguuGfaAfGf | 1940 | VPusUfscaaUfuUf | 1985 | UGGAAGUUGAAGAUC | 2030 |
| 1287273.1 | AfucaaauugaaL96 | | GfaucuUfcAfacuu | | AAAUUGAA | |
| | | | cscsa | | | |
| AD- | asasguugAfaGfAf | 1941 | VPusUfsucaAfuUf | 1986 | GGAAGUUGAAGAUCA | 2031 |
| 1287274.1 | UfcaaauugaaaL96 | | UfgaucUfuCfaacu | | AAUUGAAG | |
| | | | uscsc | | | |
| AD- | asasgaccAfcAfUf | 1942 | VPusAfsugaGfaAf | 1987 | UUAAGACCACAUUUG | 2032 |
| 1287780.1 | UfuguucucauaL96 | | CfaaauGfuGfgucu | | UUCUCAUU | |
| | | | usasa | | | |
| AD- | usgsuucuCfaUfUf | 1943 | VPusCfsuuuUfgAf | 1988 | UUUGUUCUCAUUAUC | 2033 |
| 1287791.1 | AfucucaaaagaL96 | | GfauaaUfgAfgaac | | UCAAAAGU | |
| | | | asasa | | | |
| AD- | gsusucucAfuUfAf | 1944 | VPusAfscuuUfuGf | 1989 | UUGUUCUCAUUAUCU | 2034 |
| 1287792.1 | UfcucaaaaguaL96 | | AfgauaAfuGfagaa | | CAAAAGUG | |
| | | | csasa | | | |
| AD- | ususcucaUfuAfUf | 1945 | VPusCfsacuUfuUf | 1990 | UGUUCUCAUUAUCUC | 2035 |
| 1287793.1 | CfucaaaagugaL96 | | GfagauAfaUfgaga | | AAAAGUGC | |
| | | | ascsa | | | |
| AD- | csusgcuuUfcUfCf | 1946 | VPusUfsguaAfaAf | 1991 | GGCUGCUUUCUCCAG | 2036 |
| 1287861.1 | CfaguuuuacaaL96 | | CfuggaGfaAfagca | | UUUUACAC | |
| | | | gscsc | | | |
| AD- | ususagagCfaAfUf | 1947 | VPusGfsaaaAfuCf | 1992 | CCUUAGAGCAAUUUG | 2037 |
| 1287908.1 | UfuggauuuucaL96 | | CfaaauUfgCfucua | | GAUUUUCC | |
| | | | asgsg | | | |
| AD- | ususcugaGfaAfAf | 1948 | VPusUfsugaAfuAf | 1993 | UUUUCUGAGAAAGAC | 2038 |
| 1288171.1 | GfacuauucaaaL96 | | GfucuuUfcUfcaga | | UAUUCAAA | |
| | | | asasa | | | |
| AD- | ususauguCfuUfGf | 1949 | VPusAfsaguUfuGf | 1994 | GGUUAUGUCUUGAAU | 2039 |
| 1288585.1 | AfaucaaacuuaL96 | | AfuucaAfgAfcaua | | CAAACUUA | |
| | | | ascsc | | | |
| AD- | gsascacaUfuUfGf | 1950 | VPusAfsaccUfuUf | 1995 | UGGACACAUUUGUUC | 2040 |
| 1288623.1 | UfucaaagguuaL96 | | GfaacaAfaUfgugu | | AAAGGUUC | |
| | | | cscsa | | | |
| AD- | ususguucAfaAfGf | 1951 | VPusAfsaacAfaGf | 1996 | AUUUGUUCAAAGGUU | 2041 |
| 1288630.1 | GfuucuuguuuaL96 | | AfaccuUfuGfaaca | | CUUGUUUA | |
| | | | asasu | | | |
| AD- | usgsuucaAfaGfGf | 1952 | VPusUfsaaaCfaAf | 1997 | UUUGUUCAAAGGUUC | 2042 |
| 1288631.1 | UfucuuguuuaaL96 | | GfaaccUfuUfgaac | | UUGUUUAA | |
| | | | asasa | | | |
| AD- | gsusucaaAfgGfUf | 1953 | VPusUfsuaaAfcAf | 1998 | UUGUUCAAAGGUUCU | 2043 |
| 1288632.1 | UfcuuguuuaaaL96 | | AfgaacCfuUfugaa | | UGUUUAAC | |
| | | | csasa | | | |
| AD- | uscsaaagGfuUfCf | 1954 | VPusAfsguuAfaAf | 1999 | GUUCAAAGGUUCUUG | 2044 |
| 1288634.1 | UfuguuuaacuaL96 | | CfaagaAfcCfuuug | | UUUAACUU | |
| | | | asasc | | | |
| AD- | gsgsuucuUfgUfUf | 1955 | VPusUfsaacAfaGf | 2000 | AAGGUUCUUGUUUAA | 2045 |
| 1288639.1 | UfaacuuguuaaL96 | | UfuaaaCfaAfgaac | | CUUGUUAG | |
| | | | csusu | | | |
| AD- | gsusucuuGfuUfUf | 1956 | VPusCfsuaaCfaAf | 2001 | AGGUUCUUGUUUAAC | 2046 |
| 1288640.1 | AfacuuguuagaL96 | | GfuuaaAfcAfagaa | | UUGUUAGA | |
| | | | cscsu | | | |
| AD- | ususcuugUfuUfAf | 1957 | VPusUfscuaAfcAf | 2002 | GGUUCUUGUUUAACU | 2047 |
| 1288641.1 | AfcuuguuagaaL96 | | AfguuaAfaCfaaga | | UGUUAGAC | |
| | | | ascsc | | | |
| AD- | gscsuuugGfaGfAf | 1958 | VPusUfsuaaUfuGf | 2003 | UAGCUUUGGAGAAAU | 2048 |
| 1288726.1 | AfaucaauuaaaL96 | | AfuuucUfcCfaaag | | CAAUUAAC | |
| | | | csusa | | | |
| AD- | csusuuggAfgAfAf | 1959 | VPusGfsuuaAfuUf | 2004 | AGCUUUGGAGAAAUC | 2049 |
| 1288727.1 | AfucaauuaacaL96 | | GfauuuCfuCfcaaa | | AAUUAACA | |
| | | | gscsu | | | |
| AD- | ususuggaGfaAfAf | 1960 | VPusUfsguuAfaUf | 2005 | GCUUUGGAGAAAUCA | 2050 |
| 1288728.1 | UfcaauuaacaaL96 | | UfgauuUfcUfccaa | | AUUAACAA | |
| | | | asgsc | | | |
| AD- | ususggagAfaAfUf | 1961 | VPusUfsuguUfaAf | 2006 | CUUUGGAGAAAUCAA | 2051 |
| 1288729.1 | CfaauuaacaaaL96 | | UfugauUfuCfucca | | UUAACAAU | |
| | | | asasg | | | |
| AD- | cscsagggUfuUfUf | 1962 | VPusAfsacaAfuAf | 2007 | UUCCAGGGUUUUCUG | 2052 |
| 1288823.1 | CfuguauuguuaL96 | | CfagaaAfaCfccug | | UAUUGUUU | |
| | | | gsasa | | | |
| AD- | csasggguUfuUfCf | 1963 | VPusAfsaacAfaUf | 2008 | UCCAGGGUUUUCUGU | 2053 |
| 1288824.1 | UfguauuguuuaL96 | | AfcagaAfaAfcccu | | AUUGUUUU | |
| | | | gsgsa | | | |
| AD- | usasgcaaUfgUfUf | 1964 | VPusAfsaguUfaUf | 2009 | CUUAGCAAUGUUUGG | 2054 |
| 1288880.1 | UfggauaacuuaL96 | | CfcaaaCfaUfugcu | | AUAACUUA | |
| | | | asasg | | | |
| AD- | asasuggaCfuUfCf | 1965 | VPusUfsuaaAfuGf | 2010 | AAAAUGGACUUCACA | 2055 |
| 1288938.1 | AfcacauuuaaaL96 | | UfgugaAfgUfccau | | CAUUUAAA | |
| | | | ususu | | | |
| AD- | asusggacUfuCfAf | 1966 | VPusUfsuuaAfaUf | 2011 | AAAUGGACUUCACAC | 2056 |
| 1288939.1 | CfacauuuaaaaL96 | | GfugugAfaGfucca | | AUUUAAAU | |
| | | | ususu | | | |
| AD- | usgsuguuCfcUfUf | 1967 | VPusUfsuagAfaAf | 2012 | UUUGUGUUCCUUUUG | 2057 |
| 1289328.1 | UfuguuucuaaaL96 | | CfaaaaGfgAfacac | | UUUCUAAA | |
| | | | asasa | | | |
| AD- | csgsuaagAfgUfUf | 1968 | VPusUfscuaAfuUf | 2013 | UCCGUAAGAGUUGUG | 2058 |
| 1289466.1 | GfugaauuagaaL96 | | CfacaaCfuCfuuac | | AAUUAGAU | |
| | | | gsgsa | | | |
| AD- | usgsaacuCfaAfGf | 1969 | VPusCfsaaaCfuUf | 2014 | AGUGAACUCAAGAGU | 2059 |
| 1289513.1 | AfguaaguuugaL96 | | AfcucuUfgAfguuc | | AAGUUUGA | |
| | | | ascsu | | | |
| AD- | gsasacucAfaGfAf | 1970 | VPusUfscaaAfcUf | 2015 | GUGAACUCAAGAGUA | 2060 |
| 1289514.1 | GfuaaguuugaaL96 | | UfacucUfuGfaguu | | AGUUUGAA | |
| | | | csasc | | | |
| AD- | ascsucaaGfaGfUf | 1971 | VPusUfsuucAfaAf | 2016 | GAACUCAAGAGUAAG | 2061 |
| 1289516.1 | AfaguuugaaaaL96 | | CfuuacUfcUfugag | | UUUGAAAA | |
| | | | ususc | | | |

TABLE 7
DPP4 Single Dose Screen in Primary Mouse Hepatocytes

| | % Remaining Mouse mRNA Compared to Control | | | | | | | |
|---|---|---|---|---|---|---|---|---|
| Duplex Name | 50 nM | SD | 10 nM | SD | 1 nM | SD | 0.1 nM | SD |
| AD-1285425.1 | 57 | 5 | 112 | 23 | 114 | 14 | 108 | 29 |
| AD-1285427.1 | 59 | 18 | 76 | 27 | 150 | 45 | 100 | 28 |
| AD-1285429.1 | 36 | 4 | 71 | 8 | 122 | 24 | 158 | 38 |
| AD-1286251.1 | 5 | 6 | 2 | 1 | 17 | 16 | 12 | 3 |
| AD-1286252.1 | 2 | 1 | 2 | 0 | 7 | 6 | 11 | 3 |
| AD-1286365.1 | 2 | 2 | 3 | 1 | 43 | 19 | 24 | 10 |
| AD-1286369.1 | 0 | 0 | 1 | 0 | 4 | 3 | 6 | 2 |
| AD-1286370.1 | 1 | 0 | 2 | 1 | 12 | 5 | 6 | 2 |
| AD-1286371.1 | 6 | 8 | 2 | 0 | 26 | 10 | 14 | 8 |
| AD-1286372.1 | 2 | 1 | 1 | 0 | 15 | 5 | 4 | 2 |
| AD-1286373.1 | 2 | 1 | 2 | 0 | 6 | 4 | 5 | 2 |
| AD-1286829.1 | 4 | 6 | 2 | 0 | 17 | 13 | 20 | 6 |
| AD-1287272.1 | 4 | 5 | 3 | 1 | 12 | 4 | 12 | 5 |
| AD-1287273.1 | 1 | 0 | 1 | 0 | 4 | 1 | 4 | 2 |
| AD-1287274.1 | 2 | 1 | 2 | 2 | 10 | 4 | 8 | 5 |
| AD-1287780.1 | 1 | 1 | 2 | 1 | 5 | 4 | 4 | 1 |
| AD-1287791.1 | 1 | 1 | 1 | 0 | 9 | 5 | 7 | 7 |
| AD-1287792.1 | 2 | 0 | 2 | 0 | 2 | 1 | 6 | 1 |
| AD-1287793.1 | 2 | 1 | 2 | 0 | 18 | 9 | 8 | 5 |
| AD-1287861.1 | 2 | 2 | 2 | 1 | 9 | 9 | 5 | 1 |
| AD-1287908.1 | 1 | 0 | 1 | 0 | 14 | 5 | 40 | 14 |
| AD-1288171.1 | 2 | 0 | 2 | 1 | 3 | 1 | 7 | 3 |
| AD-1288585.1 | 24 | 9 | 54 | 30 | 86 | 30 | 152 | 23 |
| AD-1288623.1 | 47 | 13 | 93 | 38 | 74 | 12 | 175 | 18 |
| AD-1288630.1 | 52 | 7 | 68 | 11 | 63 | 23 | 117 | 24 |
| AD-1288631.1 | 51 | 24 | 36 | 7 | 87 | 27 | 87 | 10 |
| AD-1288632.1 | 50 | 16 | 43 | 11 | 114 | 17 | 81 | 3 |
| AD-1288634.1 | 39 | 7 | 54 | 16 | 123 | 56 | 109 | 41 |
| AD-1288639.1 | 54 | 7 | 45 | 10 | 100 | 26 | 102 | 34 |
| AD-1288640.1 | 45 | 12 | 33 | 7 | 130 | 12 | 114 | 56 |
| AD-1288641.1 | 54 | 24 | 62 | 7 | 115 | 58 | 103 | 27 |
| AD-1288726.1 | 43 | 16 | 57 | 7 | 100 | 19 | 136 | 29 |
| AD-1288727.1 | 37 | | 50 | 15 | NA | | 169 | 27 |
| AD-1288728.1 | 37 | 10 | 73 | 14 | 112 | 16 | 114 | 17 |
| AD-1288729.1 | 49 | 8 | 83 | 17 | 92 | 40 | 81 | 8 |
| AD-1288823.1 | 55 | 22 | 59 | 13 | 118 | 38 | 176 | 21 |
| AD-1288824.1 | 66 | 13 | 59 | 20 | 140 | 10 | 146 | 73 |
| AD-1288880.1 | 71 | 41 | 62 | 34 | 96 | 13 | 183 | 42 |
| AD-1288938.1 | 51 | 10 | 81 | 39 | 133 | 23 | 153 | 39 |
| AD-1288939.1 | 96 | 24 | 64 | 21 | 87 | 37 | 144 | 57 |
| AD-1289328.1 | 42 | 13 | 53 | 12 | 93 | 36 | 120 | 32 |
| AD-1289466.1 | 92 | 30 | 79 | 12 | 63 | 22 | 107 | 26 |
| AD-1289513.1 | 88 | 5 | 115 | 45 | 111 | 36 | 124 | 57 |
| AD-1289514.1 | 40 | 10 | 54 | 13 | 102 | 48 | 132 | 37 |
| AD-1289516.1 | 47 | 12 | 59 | 10 | 80 | 31 | 125 | 29 |

TABLE 8A
DPP4 Single Dose Screen in Primary Cynomolgus Hepatocytes

| Duplex | | | | | | | | | | |
|---|---|---|---|---|---|---|---|---|---|---|
| Concentration | | | | | | | | | | |
| (nM) | 10 | 1.666667 | 0.277778 | 0.046296 | 0.007716 | 0.001286 | 0.000214 | 3.57E−05 | 5.95E−06 | 9.92E−07 |
| | % Avg of Message Remaining | | | | | | | | | |
| AD-1286365 | 15.73 | 32.24 | 42.20 | 51.38 | 55.75 | 60.90 | 96.16 | 74.89 | 101.45 | 70.26 |
| AD-1286369 | 15.56 | 25.63 | 39.76 | 53.85 | 55.06 | 81.69 | 104.30 | 84.26 | 98.91 | 97.47 |
| AD-1287272 | 25.50 | 41.74 | 48.47 | 62.14 | 66.06 | 62.67 | 115.98 | 105.80 | 121.67 | 109.57 |
| AD-1287273 | 12.39 | 20.85 | 32.02 | 50.28 | 60.68 | 65.91 | 108.53 | 99.58 | 120.09 | 123.97 |
| AD-1287274 | 14.67 | 17.05 | 39.46 | 63.19 | 61.59 | 57.47 | 107.93 | 89.75 | 117.02 | 101.72 |
| AD-1288171 | 19.72 | 26.81 | 55.29 | 75.81 | 62.09 | 72.33 | 121.55 | 109.99 | 111.68 | 109.80 |
| | STDEV | | | | | | | | | |
| AD-1286365 | 4.17 | 2.42 | 6.71 | 5.13 | 15.65 | 12.10 | 9.75 | 3.90 | 10.23 | 14.88 |
| AD-1286369 | 4.11 | 3.70 | 9.15 | 6.85 | 3.74 | 10.92 | 16.40 | 12.47 | 13.96 | 15.68 |
| AD-1287272 | 12.06 | 9.68 | 6.24 | 5.91 | 6.59 | 9.12 | 15.77 | 19.96 | 13.08 | 40.32 |
| AD-1287273 | 3.27 | 7.22 | 13.07 | 4.40 | 8.45 | 7.34 | 11.68 | 13.55 | 8.34 | 28.02 |
| AD-1287274 | 5.70 | 2.27 | 5.19 | 11.04 | 5.53 | 7.39 | 24.09 | 18.91 | 15.50 | 30.64 |
| AD-1288171 | 9.37 | 9.25 | 8.38 | 17.12 | 12.72 | 3.53 | 6.99 | 8.94 | 8.08 | 26.65 |

TABLE 8B
DPP4 Single Dose Screen in Primary Cynomolgus Hepatocytes

| | IC50 |
|---|---|
| Duplex ID | (nM) |
| AD-1286365 | 0.031 |
| AD-1286369 | 0.042 |
| AD-1287272 | 0.105 |
| AD-1287273 | 0.022 |
| AD-1287274 | 0.034 |
| AD-1288171 | 0.15 |

### Example 4. In Vivo Screening of dsRNA Duplexes in Mice

[0794] Selected duplexes of interest, identified from the above in vitro studies, were evaluated in vivo.

[0795] In particular, at day 1, groups of three mice were subcutaneously administered a single 10 mg/kg dose of the agents of interest or PBS control. Table 9 provides the duplexes of interest. At day 16 post-dose animals were sacrificed, liver and serum samples were collected, mRNA was extracted and analyzed by the RT-QPCR method.

[0796] Mouse DPP4 mRNA levels were measured. The values were normalized to the average of PBS vehicle control group. The data were expressed as percent of baseline value, and presented as mean plus standard deviation. As shown in FIG. 1, these duplexes effectively reduced the level of the mouse DPP4 messenger RNA in vivo.

TABLE 9
Duplexes of Interest

| DuplexID | Range in NM_010074.3 |
|---|---|
| AD-1286365.1 | 1204-1226 |
| AD-1286369.1 | 1208-1230 |
| AD-1286370.1 | 1209-1231 |
| AD-1286371.1 | 1210-1232 |
| AD-1286372.1 | 1211-1233 |
| AD-1286373.1 | 1212-1234 |
| AD-1286829.1 | 1700-1722 |
| AD-1287272.1 | 2223-2245 |
| AD-1287273.1 | 2224-2246 |
| AD-1287274.1 | 2225-2247 |
| AD-1288171.1 | 3232-3254 |

[0797] Duplexes AD-1287273 and AD-1286372 were selected for further evaluated in vivo and the effect of DPP4 knockdown on insulin sensitivity and insulin tolerance were investigated.

[0798] In one set of analyses, the effect of AD-1287273 on insulin sensitivity was determined by administering a single 10 mg/kg dose of AD-1287273 once every two weeks for six weeks or PBS to high fat diet-fed mice (n=6 per group). At the end of the study, 3 mice in each group were injected with vehicle and 3 mice were injected with insulin. Mice were euthanized 5 mins after treatment with insulin or vehicle. As shown in FIG. 2, insulin stimulated a greater extent of phosphorylated AKT in the liver of mice with DPP4 knockdown, indicating that knockdown of DPP4 in the liver improves insulin sensitivity.

[0799] In another set of analyses, the effect of AD-1286372 on insulin tolerance was determined by administering a single 10 mg/kg dose of AD-1286372 once every two weeks for eight weeks or PBS to high fat diet-fed mice (n=6 per group). In addition, mice (n=6) fed a regular chow diet (not high fat) were administered PBS once every two weeks for eight weeks. At the end of the study, an insulin tolerance test was performed by injection 0.75 U/kg of insulin and the blood glucose levels were determined at 10, 30, 60, 90, and 120 minutes after insulin injection. As depicted in FIG. 3, the mice fed a high fat diets and administered AD-1287272 had glycemia similar to lean mice (mice fed a regular chow diet). These results demonstrate that chronic knockdown of DPP4 in the liver improved insulin sensitivity and improved glycemia in insulin tolerance testing.

[0800] The effect of AD-1286372 knockdown on circulating DPP4 protein level was also determined. Mice were administered a single 10 mg/kg dose of AD-1286372 once every two weeks for eight weeks or PBS to high fat diet-fed mice (n=6 per group). In addition, mice (n=6) fed a regular chow diet (not high fat) were administered PBS once every two weeks for eight weeks. At the end of the study, mice were sacrificed and circulating DPP4 protein levels were determined by a DPP4 enzymatic assay. As shown in FIG. 4, the increased circulating DPP4 level in obese mice can be attenuated by liver-specific knockdown of DPP4. These results demonstrated that knockdown of DPP4 in the liver was sufficient to reduce circulating DPP4.

### EQUIVALENTS

[0801] Those skilled in the art will recognize, or be able to ascertain using no more than routine experimentation, many equivalents to the specific embodiments and methods described herein. Such equivalents are intended to be encompassed by the scope of the following claims.

The application's sequence listing, which the Patent Office published only in electronic form, follows.

SEQUENCE LISTING (2061 sequences)

SEQ ID NO: 1 - DNA, 3573 bp, Homo sapiens
  source 1..3573: mol_type = genomic DNA
agtgccccgcgccacgcgcgcctgctcccgcgccgcctgccctgcagcctgcccgcggcgcctttatacccagcgggctcggcgctcactaatgtttaactcggggccgaaacttgccagcggcgagtgactccaccgcccggagcagcggtgcaggacgcgcgtctccgccgcccgcggtgacttctgcctgcgctccttctctgaacgctcacttccgaggagacgccgacgatgaagacaccgtggaaggttcttctgggactgctgggtgctgctgcgcttgtcaccatcatcaccgtgcccgtggttctgctgaacaaaggcacagatgatgctacagctgacagtcgcaaaacttacactctaactgattacttaaaaaatacttatagactgaagttatactccttaagatggatttcagatcatgaatatctctacaaacaagaaaataatatcttggtattcaatgctgaatatggaaacagctcagttttcttggagaacagtacatttgatgagtttggacattctatcaatgattattcaatatctcctgatgggcagtttattctcttagaatacaactacgtgaagcaatggaggcattcctacacagcttcatatgacatttatgatttaaataaaaggcagctgattacagaagagaggattccaaacaacacacagtgggtcacatggtcaccagtgggtcataaattggcatatgtttggaacaatgacatttatgttaaaattgaaccaaatttaccaagttacagaatcacatggacggggaaagaagatataatatataatggaataactgactgggtttatgaagaggaagtcttcagtgcctactctgctctgtggtggtctccaaacggcacttttttagcatatgcccaatttaacgacacagaagtcccacttattgaatactccttctactctgatgagtcactgcagtacccaaagactgtacgggttccatatccaaaggcaggagctgtgaatccaactgtaaagttctttgttgtaaatacagactctctcagctcagtcaccaatgcaacttccatacaaatcactgctcctgcttctatgttgataggggatcactacttgtgtgatgtgacatgggcaacacaagaaagaatttctttgcagtggctcaggaggattcagaactattcggtcatggatatttgtgactatgatgaatccagtggaagatggaactgcttagtggcacggcaacacattgaaatgagtactactggctgggttggaagatttaggccttcagaacctcattttacccttgatggtaatagcttctacaagatcatcagcaatgaagaaggttacagacacatttgctatttccaaatagataaaaaagactgcacatttattacaaaaggcacctgggaagtcatcgggatagaagctctaaccagtgattatctatactacattagtaatgaatataaaggaatgccaggaggaaggaatctttataaaatccaacttagtgactatacaaaagtgacatgcctcagttgtgagctgaatccggaaaggtgtcagtactattctgtgtcattcagtaaagaggcgaagtattatcagctgagatgttccggtcctggtctgcccctctatactctacacagcagcgtgaatgataaagggctgagagtcctggaagacaattcagctttggataaaatgctgcagaatgtccagatgccctccaaaaaactggacttcattattttgaatgaaacaaaattttggtatcagatgatcttgcctcctcattttgataaatccaagaaatatcctctactattagatgtgtatgcaggcccatgtagtcaaaaagcagacactgtcttcagactgaactgggccacttaccttgcaagcacagaaaacattatagtagctagctttgatggcagaggaagtggttaccaaggagataagatcatgcatgcaatcaacagaagactgggaacatttgaagttgaagatcaaattgaagcagccagacaattttcaaaaatgggatttgtggacaacaaacgaattgcaatttggggctggtcatatggagggtacgtaacctcaatggtcctgggatcgggaagtggcgtgttcaagtgtggaatagccgtggcgcctgtatcccggtgggagtactatgactcagtgtacacagaacgttacatgggtctcccaactccagaagacaaccttgaccattacagaaattcaacagtcatgagcagagctgaaaattttaaacaagttgagtacctccttattcatggaacagcagatgataacgttcactttcagcagtcagctcagatctccaaagccctggtcgatgttggagtggatttccaggcaatgtggtatactgatgaagaccatggaatagctagcagcacagcacaccaacatatatatacccacatgagccacttcataaaacaatgtttctctttaccttagcacctcaaaataccatgccatttaaagcttattaaaactcatttttgttttcattatctcaaaactgcactgtcaagatgatgatgatctttaaaatacacactcaaatcaagaaacttaaggttacctttgttcccaaatttcatacctatcatcttaagtagggacttctgtcttcacaacagattattaccttacagaagtttgaattatccggtcgggttttattgtttaaaatcatttctgcatcagctgctgaaacaacaaataggaattgtttttatggaggctttgcatagattccctgagcaggattttaatctttttctaactggactggttcaaatgttgttctcttctttaaagggatggcaagatgtgggcagtgatgtcactagggcagggacaggataagagggattagggagagaagatagcagggcatggctgggaacccaagtccaagcataccaacacgagcaggctactgtcagctcccctcggagaagagctgttcacagccagactggcacagttttctgagaaagactattcaaacagtctcaggaaatcaaatatgcaaagcactgacttctaagtaaaaccacagcagttgaaaagactccaaagaaatgtaagggaaactgccagcaacgcaggcccccaggtgccagttatggctataggtgctacaaaaacacagcaagggtgatgggaaagcattgtaaatgtgcttttaaaaaaaaatactgatgttcctagtgaaagaggcagcttgaaactgagatgtgaacacatcagcttgccctgttaaaagatgaaaatatttgtatcacaaatcttaacttgaaggagtccttgcatcaatttttcttatttcatttctttgagtgtcttaattaaaagaatattttaacttccttggactcattttaaaaaatggaacataaaatacaatgttatgtattattattcccattctacatactatggaatttctcccagtcatttaataaatgtgccttcattttttcagaa

SEQ ID NO: 2 - DNA, 3570 bp, Homo sapiens
  source 1..3570: mol_type = genomic DNA
agtgccccgcgccacgcgcgcctgctcccgcgccgcctgccctgcagcctgcccgcggcgcctttatacccagcgggctcggcgctcactaatgtttaactcggggccgaaacttgccagcggcgagtgactccaccgcccggagcagcggtgcaggacgcgcgtctccgccgcccgcggtgacttctgcctgcgctccttctctgaacgctcacttccgaggagacgccgacgatgaagacaccgtggaaggttcttctgggactgctgggtgctgctgcgcttgtcaccatcatcaccgtgcccgtggttctgctgaacaaaggcaatgatgctacagctgacagtcgcaaaacttacactctaactgattacttaaaaaatacttatagactgaagttatactccttaagatggatttcagatcatgaatatctctacaaacaagaaaataatatcttggtattcaatgctgaatatggaaacagctcagttttcttggagaacagtacatttgatgagtttggacattctatcaatgattattcaatatctcctgatgggcagtttattctcttagaatacaactacgtgaagcaatggaggcattcctacacagcttcatatgacatttatgatttaaataaaaggcagctgattacagaagagaggattccaaacaacacacagtgggtcacatggtcaccagtgggtcataaattggcatatgtttggaacaatgacatttatgttaaaattgaaccaaatttaccaagttacagaatcacatggacggggaaagaagatataatatataatggaataactgactgggtttatgaagaggaagtcttcagtgcctactctgctctgtggtggtctccaaacggcacttttttagcatatgcccaatttaacgacacagaagtcccacttattgaatactccttctactctgatgagtcactgcagtacccaaagactgtacgggttccatatccaaaggcaggagctgtgaatccaactgtaaagttctttgttgtaaatacagactctctcagctcagtcaccaatgcaacttccatacaaatcactgctcctgcttctatgttgataggggatcactacttgtgtgatgtgacatgggcaacacaagaaagaatttctttgcagtggctcaggaggattcagaactattcggtcatggatatttgtgactatgatgaatccagtggaagatggaactgcttagtggcacggcaacacattgaaatgagtactactggctgggttggaagatttaggccttcagaacctcattttacccttgatggtaatagcttctacaagatcatcagcaatgaagaaggttacagacacatttgctatttccaaatagataaaaaagactgcacatttattacaaaaggcacctgggaagtcatcgggatagaagctctaaccagtgattatctatactacattagtaatgaatataaaggaatgccaggaggaaggaatctttataaaatccaacttagtgactatacaaaagtgacatgcctcagttgtgagctgaatccggaaaggtgtcagtactattctgtgtcattcagtaaagaggcgaagtattatcagctgagatgttccggtcctggtctgcccctctatactctacacagcagcgtgaatgataaagggctgagagtcctggaagacaattcagctttggataaaatgctgcagaatgtccagatgccctccaaaaaactggacttcattattttgaatgaaacaaaattttggtatcagatgatcttgcctcctcattttgataaatccaagaaatatcctctactattagatgtgtatgcaggcccatgtagtcaaaaagcagacactgtcttcagactgaactgggccacttaccttgcaagcacagaaaacattatagtagctagctttgatggcagaggaagtggttaccaaggagataagatcatgcatgcaatcaacagaagactgggaacatttgaagttgaagatcaaattgaagcagccagacaattttcaaaaatgggatttgtggacaacaaacgaattgcaatttggggctggtcatatggagggtacgtaacctcaatggtcctgggatcgggaagtggcgtgttcaagtgtggaatagccgtggcgcctgtatcccggtgggagtactatgactcagtgtacacagaacgttacatgggtctcccaactccagaagacaaccttgaccattacagaaattcaacagtcatgagcagagctgaaaattttaaacaagttgagtacctccttattcatggaacagcagatgataacgttcactttcagcagtcagctcagatctccaaagccctggtcgatgttggagtggatttccaggcaatgtggtatactgatgaagaccatggaatagctagcagcacagcacaccaacatatatatacccacatgagccacttcataaaacaatgtttctctttaccttagcacctcaaaataccatgccatttaaagcttattaaaactcatttttgttttcattatctcaaaactgcactgtcaagatgatgatgatctttaaaatacacactcaaatcaagaaacttaaggttacctttgttcccaaatttcatacctatcatcttaagtagggacttctgtcttcacaacagattattaccttacagaagtttgaattatccggtcgggttttattgtttaaaatcatttctgcatcagctgctgaaacaacaaataggaattgtttttatggaggctttgcatagattccctgagcaggattttaatctttttctaactggactggttcaaatgttgttctcttctttaaagggatggcaagatgtgggcagtgatgtcactagggcagggacaggataagagggattagggagagaagatagcagggcatggctgggaacccaagtccaagcataccaacacgagcaggctactgtcagctcccctcggagaagagctgttcacagccagactggcacagttttctgagaaagactattcaaacagtctcaggaaatcaaatatgcaaagcactgacttctaagtaaaaccacagcagttgaaaagactccaaagaaatgtaagggaaactgccagcaacgcaggcccccaggtgccagttatggctataggtgctacaaaaacacagcaagggtgatgggaaagcattgtaaatgtgcttttaaaaaaaaatactgatgttcctagtgaaagaggcagcttgaaactgagatgtgaacacatcagcttgccctgttaaaagatgaaaatatttgtatcacaaatcttaacttgaaggagtccttgcatcaatttttcttatttcatttctttgagtgtcttaattaaaagaatattttaacttccttggactcattttaaaaaatggaacataaaatacaatgttatgtattattattcccattctacatactatggaatttctcccagtcatttaataaatgtgccttcattttttcagaa

SEQ ID NO: 3 - DNA, 3567 bp, Homo sapiens
  source 1..3567: mol_type = genomic DNA
agtgccccgcgccacgcgcgcctgctcccgcgccgcctgccctgcagcctgcccgcggcgcctttatacccagcgggctcggcgctcactaatgtttaactcggggccgaaacttgccagcggcgagtgactccaccgcccggagcagcggtgcaggacgcgcgtctccgccgcccgcggtgacttctgcctgcgctccttctctgaacgctcacttccgaggagacgccgacgatgaagacaccgtggaaggttcttctgggactgctgggtgctgctgcgcttgtcaccatcatcaccgtgcccgtggttctgctgaacaaagatgatgctacagctgacagtcgcaaaacttacactctaactgattacttaaaaaatacttatagactgaagttatactccttaagatggatttcagatcatgaatatctctacaaacaagaaaataatatcttggtattcaatgctgaatatggaaacagctcagttttcttggagaacagtacatttgatgagtttggacattctatcaatgattattcaatatctcctgatgggcagtttattctcttagaatacaactacgtgaagcaatggaggcattcctacacagcttcatatgacatttatgatttaaataaaaggcagctgattacagaagagaggattccaaacaacacacagtgggtcacatggtcaccagtgggtcataaattggcatatgtttggaacaatgacatttatgttaaaattgaaccaaatttaccaagttacagaatcacatggacggggaaagaagatataatatataatggaataactgactgggtttatgaagaggaagtcttcagtgcctactctgctctgtggtggtctccaaacggcacttttttagcatatgcccaatttaacgacacagaagtcccacttattgaatactccttctactctgatgagtcactgcagtacccaaagactgtacgggttccatatccaaaggcaggagctgtgaatccaactgtaaagttctttgttgtaaatacagactctctcagctcagtcaccaatgcaacttccatacaaatcactgctcctgcttctatgttgataggggatcactacttgtgtgatgtgacatgggcaacacaagaaagaatttctttgcagtggctcaggaggattcagaactattcggtcatggatatttgtgactatgatgaatccagtggaagatggaactgcttagtggcacggcaacacattgaaatgagtactactggctgggttggaagatttaggccttcagaacctcattttacccttgatggtaatagcttctacaagatcatcagcaatgaagaaggttacagacacatttgctatttccaaatagataaaaaagactgcacatttattacaaaaggcacctgggaagtcatcgggatagaagctctaaccagtgattatctatactacattagtaatgaatataaaggaatgccaggaggaaggaatctttataaaatccaacttagtgactatacaaaagtgacatgcctcagttgtgagctgaatccggaaaggtgtcagtactattctgtgtcattcagtaaagaggcgaagtattatcagctgagatgttccggtcctggtctgcccctctatactctacacagcagcgtgaatgataaagggctgagagtcctggaagacaattcagctttggataaaatgctgcagaatgtccagatgccctccaaaaaactggacttcattattttgaatgaaacaaaattttggtatcagatgatcttgcctcctcattttgataaatccaagaaatatcctctactattagatgtgtatgcaggcccatgtagtcaaaaagcagacactgtcttcagactgaactgggccacttaccttgcaagcacagaaaacattatagtagctagctttgatggcagaggaagtggttaccaaggagataagatcatgcatgcaatcaacagaagactgggaacatttgaagttgaagatcaaattgaagcagccagacaattttcaaaaatgggatttgtggacaacaaacgaattgcaatttggggctggtcatatggagggtacgtaacctcaatggtcctgggatcgggaagtggcgtgttcaagtgtggaatagccgtggcgcctgtatcccggtgggagtactatgactcagtgtacacagaacgttacatgggtctcccaactccagaagacaaccttgaccattacagaaattcaacagtcatgagcagagctgaaaattttaaacaagttgagtacctccttattcatggaacagcagatgataacgttcactttcagcagtcagctcagatctccaaagccctggtcgatgttggagtggatttccaggcaatgtggtatactgatgaagaccatggaatagctagcagcacagcacaccaacatatatatacccacatgagccacttcataaaacaatgtttctctttaccttagcacctcaaaataccatgccatttaaagcttattaaaactcatttttgttttcattatctcaaaactgcactgtcaagatgatgatgatctttaaaatacacactcaaatcaagaaacttaaggttacctttgttcccaaatttcatacctatcatcttaagtagggacttctgtcttcacaacagattattaccttacagaagtttgaattatccggtcgggttttattgtttaaaatcatttctgcatcagctgctgaaacaacaaataggaattgtttttatggaggctttgcatagattccctgagcaggattttaatctttttctaactggactggttcaaatgttgttctcttctttaaagggatggcaagatgtgggcagtgatgtcactagggcagggacaggataagagggattagggagagaagatagcagggcatggctgggaacccaagtccaagcataccaacacgagcaggctactgtcagctcccctcggagaagagctgttcacagccagactggcacagttttctgagaaagactattcaaacagtctcaggaaatcaaatatgcaaagcactgacttctaagtaaaaccacagcagttgaaaagactccaaagaaatgtaagggaaactgccagcaacgcaggcccccaggtgccagttatggctataggtgctacaaaaacacagcaagggtgatgggaaagcattgtaaatgtgcttttaaaaaaaaatactgatgttcctagtgaaagaggcagcttgaaactgagatgtgaacacatcagcttgccctgttaaaagatgaaaatatttgtatcacaaatcttaacttgaaggagtccttgcatcaatttttcttatttcatttctttgagtgtcttaattaaaagaatattttaacttccttggactcattttaaaaaatggaacataaaatacaatgttatgtattattattcccattctacatactatggaatttctcccagtcatttaataaatgtgccttcattttttcagaa

SEQ ID NO: 4 - DNA, 3519 bp, Homo sapiens
  source 1..3519: mol_type = genomic DNA
agtgccccgcgccacgcgcgcctgctcccgcgccgcctgccctgcagcctgcccgcggcgcctttatacccagcgggctcggcgctcactaatgtttaactcggggccgaaacttgccagcggcgagtgactccaccgcccggagcagcggtgcaggacgcgcgtctccgccgcccgcggtgacttctgcctgcgctccttctctgaacgctcacttccgaggagacgccgacgatgaagacaccgtggaaggttcttctgggactgctgggtgctgctgcgcttgtcaccatcatcaccgtgcccgtggttctgctgaacaaaggcacagatgatgctacagctgacagtcgcaaaacttacactctaactgattacttaaaaaatacttatagactgaagttatactccttaagatggatttcagatcatgaatatctctacaaacaagaaaataatatcttggtattcaatgctgaatatggaaacagctcagttttcttggagaacagtacatttgatgagtttggacattctatcaatgattattcaatatctcctgatgggcagtttattctcttagaatacaactacgtgaagcaatggaggcattcctacacagcttcatatgacatttatgatttaaataaaaggcagctgattacagaagagaggattccaaacaacacacagtgggtcacatggtcaccagtgggtcataaattggcatatgtttggaacaatgacatttatgttaaaattgaaccaaatttaccaagttacagaatcacatggacggggaaagaagatataatatataatggaataactgactgggtttatgaagaggaagtcttcagtgcctactctgctctgtggtggtctccaaacggcacttttttagcatatgcccaatttaacgacacagaagtcccacttattgaatactccttctactctgatgagtcactgcagtacccaaagactgtacgggttccatatccaaaggcaggagctgtgaatccaactgtaaagttctttgttgtaaatacagactctctcagctcagtcaccaatgcaacttccatacaaatcactgctcctgcttctatgttgataggggatcactacttgtgtgatgtgacatgggcaacacaagaaagaatttctttgcagtggctcaggaggattcagaactattcggtcatggatatttgtgactatgatgaatccagtggaagatggaactgcttagtggcacggcaacacattgaaatgagtactactggctgggttggaagatttaggccttcagaacctcattttacccttgatggtaatagcttctacaagatcatcagcaatgaagaaggttacagacacatttgctatttccaaatagataaaaaagactgcacatttattacaaaaggcacctgggaagtcatcgggatagaagctctaaccagtgattatctaatccaacttagtgactatacaaaagtgacatgcctcagttgtgagctgaatccggaaaggtgtcagtactattctgtgtcattcagtaaagaggcgaagtattatcagctgagatgttccggtcctggtctgcccctctatactctacacagcagcgtgaatgataaagggctgagagtcctggaagacaattcagctttggataaaatgctgcagaatgtccagatgccctccaaaaaactggacttcattattttgaatgaaacaaaattttggtatcagatgatcttgcctcctcattttgataaatccaagaaatatcctctactattagatgtgtatgcaggcccatgtagtcaaaaagcagacactgtcttcagactgaactgggccacttaccttgcaagcacagaaaacattatagtagctagctttgatggcagaggaagtggttaccaaggagataagatcatgcatgcaatcaacagaagactgggaacatttgaagttgaagatcaaattgaagcagccagacaattttcaaaaatgggatttgtggacaacaaacgaattgcaatttggggctggtcatatggagggtacgtaacctcaatggtcctgggatcgggaagtggcgtgttcaagtgtggaatagccgtggcgcctgtatcccggtgggagtactatgactcagtgtacacagaacgttacatgggtctcccaactccagaagacaaccttgaccattacagaaattcaacagtcatgagcagagctgaaaattttaaacaagttgagtacctccttattcatggaacagcagatgataacgttcactttcagcagtcagctcagatctccaaagccctggtcgatgttggagtggatttccaggcaatgtggtatactgatgaagaccatggaatagctagcagcacagcacaccaacatatatatacccacatgagccacttcataaaacaatgtttctctttaccttagcacctcaaaataccatgccatttaaagcttattaaaactcatttttgttttcattatctcaaaactgcactgtcaagatgatgatgatctttaaaatacacactcaaatcaagaaacttaaggttacctttgttcccaaatttcatacctatcatcttaagtagggacttctgtcttcacaacagattattaccttacagaagtttgaattatccggtcgggttttattgtttaaaatcatttctgcatcagctgctgaaacaacaaataggaattgtttttatggaggctttgcatagattccctgagcaggattttaatctttttctaactggactggttcaaatgttgttctcttctttaaagggatggcaagatgtgggcagtgatgtcactagggcagggacaggataagagggattagggagagaagatagcagggcatggctgggaacccaagtccaagcataccaacacgagcaggctactgtcagctcccctcggagaagagctgttcacagccagactggcacagttttctgagaaagactattcaaacagtctcaggaaatcaaatatgcaaagcactgacttctaagtaaaaccacagcagttgaaaagactccaaagaaatgtaagggaaactgccagcaacgcaggcccccaggtgccagttatggctataggtgctacaaaaacacagcaagggtgatgggaaagcattgtaaatgtgcttttaaaaaaaaatactgatgttcctagtgaaagaggcagcttgaaactgagatgtgaacacatcagcttgccctgttaaaagatgaaaatatttgtatcacaaatcttaacttgaaggagtccttgcatcaatttttcttatttcatttctttgagtgtcttaattaaaagaatattttaacttccttggactcattttaaaaaatggaacataaaatacaatgttatgtattattattcccattctacatactatggaatttctcccagtcatttaataaatgtgccttcattttttcagaa

SEQ ID NO: 5 - DNA, 3417 bp, Homo sapiens
  source 1..3417: mol_type = genomic DNA
acgcgcgtctccgccgcccgcggtgacttctgcctgcgctccttctctgaacgctcacttccgaggagacgccgacgatgaagacaccgtggaaggttcttctgggactgctgggtgctgctgcgcttgtcaccatcatcaccgtgcccgtggttctgctgaacaaaggcaatgatgctacagctgacagtcgcaaaacttacactctaactgattacttaaaaaatacttatagactgaagttatactccttaagatggatttcagatcatgaatatctctacaaacaagaaaataatatcttggtattcaatgctgaatatggaaacagctcagttttcttggagaacagtacatttgatgagtttggacattctatcaatgattattcaatatctcctgatgggcagtttattctcttagaatacaactacgtgaagcaatggaggcattcctacacagcttcatatgacatttatgatttaaataaaaggcagctgattacagaagagaggattccaaacaacacacagtgggtcacatggtcaccagtgggtcataaattggcatatgtttggaacaatgacatttatgttaaaattgaaccaaatttaccaagttacagaatcacatggacggggaaagaagatataatatataatggaataactgactgggtttatgaagaggaagtcttcagtgcctactctgctctgtggtggtctccaaacggcacttttttagcatatgcccaatttaacgacacagaagtcccacttattgaatactccttctactctgatgagtcactgcagtacccaaagactgtacgggttccatatccaaaggcaggagctgtgaatccaactgtaaagttctttgttgtaaatacagactctctcagctcagtcaccaatgcaacttccatacaaatcactgctcctgcttctatgttgataggggatcactacttgtgtgatgtgacatgggcaacacaagaaagaatttctttgcagtggctcaggaggattcagaactattcggtcatggatatttgtgactatgatgaatccagtggaagatggaactgcttagtggcacggcaacacattgaaatgagtactactggctgggttggaagatttaggccttcagaacctcattttacccttgatggtaatagcttctacaagatcatcagcaatgaagaaggttacagacacatttgctatttccaaatagataaaaaagactgcacatttattacaaaaggcacctgggaagtcatcgggatagaagctctaaccagtgattatctatactacattagtaatgaatataaaggaatgccaggaggaaggaatctttataaaatccaacttagtgactatacaaaagtgacatgcctcagttgtgagctgaatccggaaaggtgtcagtactattctgtgtcattcagtaaagaggcgaagtattatcagctgagatgttccggtcctggtctgcccctctatactctacacagcagcgtgaatgataaagggctgagagtcctggaagacaattcagctttggataaaatgctgcagaatgtccagatgccctccaaaaaactggacttcattattttgaatgaaacaaaattttggtatcagatgatcttgcctcctcattttgataaatccaagaaatatcctctactattagatgtgtatgcaggcccatgtagtcaaaaagcagacactgtcttcagactgaactgggccacttaccttgcaagcacagaaaacattatagtagctagctttgatggcagaggaagtggttaccaaggagataagatcatgcatgcaatcaacagaagactgggaacatttgaagttgaagatcaaattgaagcagccagacaattttcaaaaatgggatttgtggacaacaaacgaattgcaatttggggctggtcatatggagggtacgtaacctcaatggtcctgggatcgggaagtggcgtgttcaagtgtggaatagccgtggcgcctgtatcccggtgggagtactatgactcagtgtacacagaacgttacatgggtctcccaactccagaagacaaccttgaccattacagaaattcaacagtcatgagcagagctgaaaattttaaacaagttgagtacctccttattcatggaacagcagatgataacgttcactttcagcagtcagctcagatctccaaagccctggtcgatgttggagtggatttccaggcaatgtggtatactgatgaagaccatggaatagctagcagcacagcacaccaacatatatatacccacatgagccacttcataaaacaatgtttctctttaccttagcacctcaaaataccatgccatttaaagcttattaaaactcatttttgttttcattatctcaaaactgcactgtcaagatgatgatgatctttaaaatacacactcaaatcaagaaacttaaggttacctttgttcccaaatttcatacctatcatcttaagtagggacttctgtcttcacaacagattattaccttacagaagtttgaattatccggtcgggttttattgtttaaaatcatttctgcatcagctgctgaaacaacaaataggaattgtttttatggaggctttgcatagattccctgagcaggattttaatctttttctaactggactggttcaaatgttgttctcttctttaaagggatggcaagatgtgggcagtgatgtcactagggcagggacaggataagagggattagggagagaagatagcagggcatggctgggaacccaagtccaagcataccaacacgagcaggctactgtcagctcccctcggagaagagctgttcacagccagactggcacagttttctgagaaagactattcaaacagtctcaggaaatcaaatatgcaaagcactgacttctaagtaaaaccacagcagttgaaaagactccaaagaaatgtaagggaaactgccagcaacgcaggcccccaggtgccagttatggctataggtgctacaaaaacacagcaagggtgatgggaaagcattgtaaatgtgcttttaaaaaaaaatactgatgttcctagtgaaagaggcagcttgaaactgagatgtgaacacatcagcttgccctgttaaaagatgaaaatatttgtatcacaaatcttaacttgaaggagtccttgcatcaatttttcttatttcatttctttgagtgtcttaattaaaagaatattttaacttccttggactcattttaaaaaatggaacataaaatacaatgttatgtattattattcccattctacatactatggaatttctcccagtcatttaataaatgtgccttcattttttcagaagtaa

SEQ ID NO: 6 - DNA, 5268 bp, Mus musculus
  source 1..5268: mol_type = genomic DNA
gactgacagacctctcagggaaggggacaagagaactggcagctagtttctgcagtgagccgtgaatctgccaaactccatgcctgcttgaacctcagctgcctcgattatccacgcaagggagcaacagttaaacctcaatgtgcaatgtctcttttagcaaagggggttcgctgttccccttatccctcactcatgggggccctgcgtgctacttcctggctcgcctagtggtcctaccgcgctgggtcggctgccccgcgctcacactgtgcaccgaagcccgccttgcgctaactaatgtttaactcaggccgaaacttggcggcgagctcagggtgactgcgtgcagagcagccgcgcaggacgtccgtctctgcgcgcagtgacttctgcctgcgctcaagcttcagagttcagtttcaaggagccgcccgaccatgaagacaccgtggaaggttcttctgggactgcttggtgtcgctgcgcttgtcaccatcatcaccgtgccaatagttctgctgagcaaagatgaagcggcagctgacagccgcagaacgtattcactagctgactatttaaagagtacctttcgggtcaagtcctactctttgtggtgggtttcagactttgaatacctctacaaacaagagaacaatatcttgctgctcaatgctgaacatggaaacagctccattttcttggagaacagtacctttgaaagctttggatatcattcagtgtcacctgaccgactgtttgttctcttggaatacaactacgtgaagcaatggagacattcctacacagcttcatacaacatttatgatgtgaataaaagacagctgatcacagaagagaagattccaaataatacacagtggatcacatggtcaccagaaggtcataagttggcatatgtctggaagaatgatatttacgttaaagttgaaccacacttacctagtcataggatcacatcgacaggagaagaaaatgtaatatataatggaataactgactgggtttatgaagaggaagtcttcggtgcctactctgcactgtggtggtctccaaacaacacgtttctagcttatgcccagtttaacgacacaggagtgccgctcattgaatactccttctattctgatgagtcactgcagtaccccaagacagtgtggattccatacccaaaggcaggagctgtgaatccaactgtaaagttctttattgtaaatatagactctctcagctcatcctctagtgcggctcccatccaaatccctgctcctgcatctgtggcaagaggggatcactatttatgtgatgtggtgtgggctacagaagaaagaatttcactacagtggctcaggaggattcagaactattccgtgatggctatctgtgactatgataagatcaacctaacgtggaactgtccatccgagcagcagcatgttgaaatgagtaccacaggctgggtcggaagatttaggcccgcagaacctcacttcacctctgatggaagcagcttctataagatcatcagcgacaaagatggctacaaacacatctgccacttcccgaaagataagaaagactgtacatttattacaaaaggagcctgggaagtcattagtatcgaagctctgaccagcgattatctatactacattagtaaccaatataaagaaatgccaggaggaagaaatctctataaaattcaacttactgaccacacaaatgtgaagtgccttagttgtgacctgaatccagaaagatgtcagtattatgcggtatcatttagtaaagaggcaaagtactatcagctgggatgttggggccccggtctgcccctctacactctacatcgtagcacggatcataaagagctgcgagtcctggaagacaattctgctttggatagaatgctgcaggatgtccagatgccttcaaaaaaattggacttcattgttttgaatgaaacaagattttggtatcaaatgatcttgccccctcattttgataaatccaagaaatatcctctactattagatgtatatgcaggtccctgtagtcaaaaagcagatgcttccttcagactgaactgggccacttaccttgcaagtacagaaaacatcatagtagctagctttgacggcagaggaagtggttaccaaggagataagatcatgcatgcaatcaacagaagattgggaacactggaagttgaagatcaaattgaagcagccaggcaatttgtaaaaatgggatttgtggatagcaagcgagttgcaatttggggctggtcatatggagggtatgtaacctcaatggtcctgggatcgggaagtggcgtgttcaagtgcggaatagctgtggcacctgtgtcacggtgggagtactatgactcagtgtacacagagcgttacatgggtctcccaattccagaagacaaccttgaccattacaggaactcaacagtcatgagcagagctgaacattttaaacaagttgagtacctccttattcatggaacggcagatgataatgttcactttcagcagtcagctcagatctccaaagccctggtggatgctggtgtggatttccaagcaatgtggtacacggatgaagaccacgggatcgctagcagcacagctcaccagcacatctattcccacatgagccatttcctccagcagtgcttctccttacactagcacagcatagctctccatagcttatttaagaccacatttgttctcattatctcaaaagtgcactgttaagatgaagatcttaataatgttgcattgagacatttcaggctgctttctccagttttacacctgcaatcctaactaaggatgcctgtccccagaacagattactaccttagagcaatttggattttcccctctgttttgtttatcatttaaaatcatttccacatcagctgctgaaacaacaaatataaattatttttgcaagagctatgcatagatttcctgagcagaatttcaattttttttttccttactagactggtccaaatctcgtttcccttatttaagtgggtgacaagatgtgggtaatgatgtcattagggcagcaacaagagaagagggagcagggagtatggctagaaacccaggtccaagcatacaaaccaaccaggctactgtcagctcgcctcgagaagagctgttcactgccagactggcacagttttctgagaaagactattcaaacagtctcaggaaatcatatatgcaaagcactgacttctaagtaaaaccacagcagttgaatagactccaaagaaatgcaagggacgctgccagcaatgtaagggccccaggtgccagttatggctataggtgctacaaaaacacagcaagggtgatgggaaagcattgtaaatgtgcttttgaaaattaccgatgtctcctagtgaaaagaggcagcttggaacatatcgacttgccctgttaaaagttgaaaatatttgtgtcacaaattctaacatgaaggaatacttgcattagtttttcctacttcatttctttgagcattttaattaaaatattttaacttcattagctttttaatggaaaattaaatgagaatgttttgtgttattatttctattctacacactggaactttgcctggtcatttagtaaatatgcttccatttttcagaggtaatgggttatgtcttgaatcaaacttacaccgcattgacatatggacacatttgttcaaaggttcttgtttaacttgttagacatccaagactgtcttgtaaacatggaaagagttcagcttttttttaaaaaaaattagatacataaaactgtttaaacttaaatgattcataggggtttctctaataccccctgaaatgtctattttcacacttatcacatagctttggagaaatcaattaacaataatttggtcatttaaatactatggaattcataatataatttaatctaggggagcatgtgaggctcacagcatgggacagaacactatcagcagagtcgttttggttgacttgtctttccagggttttctgtattgttttgtctctggtctcttcttgtgggggggtgatataatagaaaacatacattctgatattgaacttgacttagcaatgtttggataacttagaaaatactacgttttgtttcaattatttataacacaactgcatttttaaaatggacttcacacatttaaatgcagtttcagaccagagtgctagataaaattattctggacaggtgagccacagcatgaattgcaaacgtggcagaaatggaaactacctatcaaataagggtgggattagatattcatgagcttgatgccacttcccaggcccccccacggattcactccaccttaagtaagtctcaagtcctattcttccattgcaagcactgctggtaagtaagcctgtaggtttctggctataatcctattttagaatacagcactttcaccatgtgcagcagtatccacctgcaaagttctagatcaagggacagaggtgacatgttcctgtcagtgtgaaaacataaacagaaattacccgttgtgaattcatcaatctaaaccccattatataataatctagattttattaatatatcttatatgatgtatcacataatatttatataatagccaaaccatgaattttgtgttccttttgtttctaaatatgttgtttctggagcctgaattaatcaaatatcacagcacacatttttcaggcaatgatggtttcaaatggtgataatgtgaataaattcagtttttatttgactctcatagcacaagttttactgttccgtaagagttgtgaattagattaagaacctgatgcggaagttctaagtgaactcaagagtaagtttgaaaagcacaagagctagtaacgtcactaagggacatagacctgtctctgagggacatatgcattctctggaagcacatggatcgagcttccttctcagagcacaccagcatcaggggcgcatgcgctaagggaaggccgccctgacgcttcactatccaggatcacttcagtctgtgccattccgggcactgtggttctcggagtattagcagttccacctcttggcgcttattgctcttgctctaagttggagtgagaatgccggtttataaaattactagatttgtacaatatttaagattcaataaattctaagtgaaaaaaca

SEQ ID NO: 7 - DNA, 3654 bp, Mus musculus
  source 1..3654: mol_type = genomic DNA
gactgacagacctctcagggaaggggacaagagaactggcagctagtttctgcagtgagccgtgaatctgccaaactccatgcctgcttgaacctcagctgcctcgattatccacgcaagggagcaacagttaaacctcaatgtgcaatgtctcttttagcaaagggggttcgctgttccccttatccctcactcatgggggccctgcgtgctacttcctggctcgcctagtggtcctaccgcgctgggtcggctgccccgcgctcacactgtgcaccgaagcccgccttgcgctaactaatgtttaactcaggccgaaacttggcggcgagctcagggtgactgcgtgcagagcagccgcgcaggacgtccgtctctgcgcgcagtgacttctgcctgcgctcaagcttcagagttcagtttcaaggagccgcccgaccatgaagacaccgtggaaggttcttctgggactgcttggtgtcgctgcgcttgtcaccatcatcaccgtgccaatagttctgctgagcaaagatgaagcggcagctgacagccgcagaacgtattcactagctgactatttaaagagtacctttcgggtcaagtcctactctttgtggtgggtttcagactttgaatacctctacaaacaagagaacaatatcttgctgctcaatgctgaacatggaaacagctccattttcttggagaacagtacctttgaaagctttggatatcattcagtgtcacctgaccgactgtttgttctcttggaatacaactacgtgaagcaatggagacattcctacacagcttcatacaacatttatgatgtgaataaaagacagctgatcacagaagagaagattccaaataatacacagtggatcacatggtcaccagaaggtcataagttggcatatgtctggaagaatgatatttacgttaaagttgaaccacacttacctagtcataggatcacatcgacaggagaagaaaatgtaatatataatggaataactgactgggtttatgaagaggaagtcttcggtgcctactctgcactgtggtggtctccaaacaacacgtttctagcttatgcccagtttaacgacacaggagtgccgctcattgaatactccttctattctgatgagtcactgcagtaccccaagacagtgtggattccatacccaaaggcaggagctgtgaatccaactgtaaagttctttattgtaaatatagactctctcagctcatcctctagtgcggctcccatccaaatccctgctcctgcatctgtggcaagaggggatcactatttatgtgatgtggtgtgggctacagaagaaagaatttcactacagtggctcaggaggattcagaactattccgtgatggctatctgtgactatgataagatcaacctaacgtggaactgtccatccgagcagcagcatgttgaaatgagtaccacaggctgggtcggaagatttaggcccgcagaacctcacttcacctctgatggaagcagcttctataagatcatcagcgacaaagatggctacaaacacatctgccacttcccgaaagataagaaagactgtacatttattacaaaaggagcctgggaagtcattagtatcgaagctctgaccagcgattatctatactacattagtaaccaatataaagaaatgccaggaggaagaaatctctataaaattcaacttactgaccacacaaatgtgaagtgccttagttgtgacctgaatccagaaagatgtcagtattatgcggtatcatttagtaaagaggcaaagtactatcagctgggatgttggggccccggtctgcccctctacactctacatcgtagcacggatcataaagagctgcgagtcctggaagacaattctgctttggatagaatgctgcaggatgtccagatgccttcaaaaaaattggacttcattgttttgaatgaaacaagattttggtatcaaatgatcttgccccctcattttgataaatccaagaaatatcctctactattagatgtatatgcaggtccctgtagtcaaaaagcagatgcttccttcagactgaactgggccacttaccttgcaagtacagaaaacatcatagtagctagctttgacggcagaggaagtggttaccaaggagataagatcatgcatgcaatcaacagaagattgggaacactggaagttgaagatcaaattgaagcagccaggcaatttgtaaaaatgggatttgtggatagcaagcgagttgcaatttggggctggtcatatggagggtatgtaacctcaatggtcctgggatcgggaagtggcgtgttcaagtgcggaatagctgtggcacctgtgtcacggtgggagtactatgactcagtgtacacagagcgttacatgggtctcccaattccagaagacaaccttgaccattacaggaactcaacagtcatgagcagagctgaacattttaaacaagttgagtacctccttattcatggaacggcagatgataatgttcactttcagcagtcagctcagatctccaaagccctggtggatgctggtgtggatttccaagcaatggtatactaagactttgttcagggggaacaaaatatctagtgggtctagtttcccctttggcagttactttttcccaaggaagtctcagatgacaggaagagaagagaggccccttatcattccgctgtgaagttggagacgtgctatccttgagtcatacacagagtaaatattagacagtttgaggttgagaaacacagtattacatatcctgggagtgtcaaaacaccattcttctattcctgtgatggttcagtctctccctgttttgattcgaaagtaatcacttattctgtaaatgtgtggcagagtaattctaaagtgaaaccagcatgataatagctgaaatgtaaaatccattctgttattatgattactagccatcctaacaacagtggggtattaatagttagcatgcttcagctcttgcagtcgctacattatcttttgttgaacaactgcaggcagcaaacaattaggcttgtttataaagtcagaaatggctggggctgggtttgcctgtatagaggaggttttgggtatttagtctaactcatcttcttcattagaattcttcatcagactttatacatacatacatatatatatatatatatatatatatatatatatatatatatatatatatatatatgtgcatcttgcactaataatacaatgctataaaacaacacaactttcttaactgttttggctagaaaatagtgtccctccacttctgacacataattagctgtgtgctccgcttcaatagtgcccacctatgtaagagtggattttttattttgtactgagaaaacctgccatatattttggaccagattctcagaagaagttgaggtttgttttttccatgtttaaagcaaagttatataatacttgaggcatgattaaaattaacttatgtctcaggaatatgtacctgcctgacataaatgtcagatatacagagttcttaatttccagtgtaaaatttaaatgttggtaaataaaacatttgtcttttggcttc

SEQ ID NO: 8 - DNA, 2998 bp, Mus musculus
  source 1..2998: mol_type = genomic DNA
aatcaccttttctctttctttgccagccagataacatgggacacccaaccccttctctcagactgacagacctctcagggaaggggacaagagaactggcagctagtttctgcagtgagccgtgaatctgccaaactccatgcctgcttgaacctcagctgcctcgattatccacgcaagggagcaacagttaaacctcaatgtgcaatgtctcttttagcaaagggggttcgctgttccccttatccctcactcatgggggccctgcgtgctacttcctggctcgcctagtggtcctaccgcgctgggtcggctgccccgcgctcacactgtgcaccgaagcccgccttgcgctaactaatgtttaactcaggccgaaacttggcggcgagctcagggtgactgcgtgcagagcagccgcgcaggacgtccgtctctgcgcgcagtgacttctgcctgcgctcaagcttcagagttcagtttcaaggagccgcccgaccatgaagacaccgtggaaggttcttctgggactgcttggtgtcgctgcgcttgtcaccatcatcaccgtgccaatagttctgctgagcaaagatgaagcggcagctgacagccgcagaacgtattcactagctgactatttaaagagtacctttcgggtcaagtcctactctttgtggtgggtttcagactttgaatacctctacaaacaagagaacaatatcttgctgctcaatgctgaacatggaaacagctccattttcttggagaacagtacctttgaaagctttggatatcattcagtgtcacctgaccgactgtttgttctcttggaatacaactacgtgaagcaatggagacattcctacacagcttcatacaacatttatgatgtgaataaaagacagctgatcacagaagagaagattccaaataatacacagtggatcacatggtcaccagaaggtcataagttggcatatgtctggaagaatgatatttacgttaaagttgaaccacacttacctagtcataggatcacatcgacaggagaagaaaatgtaatatataatggaataactgactgggtttatgaagaggaagtcttcggtgcctactctgcactgtggtggtctccaaacaacacgtttctagcttatgcccagtttaacgacacaggagtgccgctcattgaatactccttctattctgatgagtcactgcagtaccccaagacagtgtggattccatacccaaaggcaggagctgtgaatccaactgtaaagttctttattgtaaatatagactctctcagctcatcctctagtgcggctcccatccaaatccctgctcctgcatctgtggcaagaggggatcactatttatgtgatgtggtgtgggctacagaagaaagaatttcactacagtggctcaggaggattcagaactattccgtgatggctatctgtgactatgataagatcaacctaacgtggaactgtccatccgagcagcagcatgttgaaatgagtaccacaggctgggtcggaagatttaggcccgcagaacctcacttcacctctgatggaagcagcttctataagatcatcagcgacaaagatggctacaaacacatctgccacttcccgaaagataagaaagactgtacatttattacaaaaggagcctgggaagtcattagtatcgaagctctgaccagcgattatctatactacattagtaaccaatataaagaaatgccaggaggaagaaatctctataaaattcaacttactgaccacacaaatgtgaagtgccttagttgtgacctgaatccagaaagatgtcagtattatgcggtatcatttagtaaagaggcaaagtactatcagctgggatgttggggccccggtctgcccctctacactctacatcgtagcacggatcataaagagctgcgagtcctggaagacaattctgctttggatagaatgctgcaggatgtccagatgccttcaaaaaaattggacttcattgttttgaatgaaacaagattttggtatcaaatgatcttgccccctcattttgataaatccaagaaatatcctctactattagatgtatatgcaggtccctgtagtcaaaaagcagatgcttccttcagactgaactgggccacttaccttgcaagtacagaaaacatcatagtagctagctttgacggcagaggaagtggttaccaaggagataagatcatgcatgcaatcaacagaagattgggaacactggaagttgaagatcaaattgaagcagccaggcaatttgtaaaaatgggatttgtggatagcaagcgagttgcaatttggggctggtcatatggagggtatgtaacctcaatggtcctgggatcgggaagtggcgtgttcaagtgcggaatagctgtggcacctgtgtcacggtgggagtactatgactcagtgtacacagagcgttacatgggtctcccaattccagaagacaaccttgaccattacagggtgttccctgtatgaggtagtcgtgtaaatagaagtcacttcctcctgccaatggcaacgcacgcacattgggtgcacgaagtcagccttcctcttcactgcacagatggcacccgaggactgtttaatccttccacgccaggagtcgggttttcttggcatgaaattcattgctggcaatggacacattaaaactgccagtaccagggagctaaaggttcccaatgtgttactcagagggattatctgggagggtgatagctaaggtgggcaggagaaaagtgaggtaaatgcattgagggaattgtctccactgagccccgctccgctggttgcttcctctgagcctggaggactgaatccgcgcgcggggatcggagtctgagaggaaccctgaatctaagttgcctatttttggtgcacagcaggttttagaataaagctgccctcctttgttttttaaa

SEQ ID NO: 9 - DNA, 3481 bp, Mus musculus
  source 1..3481: mol_type = genomic DNA
aatcaccttttctctttctttgccagccagataacatgggacacccaaccccttctctcagactgacagacctctcagggaaggggacaagagaactggcagctagtttctgcagtgagccgtgaatctgccaaactccatgcctgcttgaacctcagctgcctcgattatccacgcaagggagcaacagttaaacctcaatgtgcaatgtctcttttagcaaagggggttcgctgttccccttatccctcactcatgggggccctgcgtgctacttcctggctcgcctagtggtcctaccgcgctgggtcggctgccccgcgctcacactgtgcaccgaagcccgccttgcgctaactaatgtttaactcaggccgaaacttggcggcgagctcagggtgactgcgtgcagagcagccgcgcaggacgtccgtctctgcgcgcagtgacttctgcctgcgctcaagcttcagagttcagtttcaaggagccgcccgaccatgaagacaccgtggaaggttcttctgggactgcttggtgtcgctgcgcttgtcaccatcatcaccgtgccaatagttctgctgagcaaagatgaagcggcagctgacagccgcagaacgtattcactagctgactatttaaagagtacctttcgggtcaagtcctactctttgtggtgggtttcagactttgaatacctctacaaacaagagaacaatatcttgctgctcaatgctgaacatggaaacagctccattttcttggagaacagtacctttgaaagctttggatatcattcagtgtcacctgaccgactgtttgttctcttggaatacaactacgtgaagcaatggagacattcctacacagcttcatacaacatttatgatgtgaataaaagacagctgatcacagaagagaagattccaaataatacacagtggatcacatggtcaccagaaggtcataagttggcatatgtctggaagaatgatatttacgttaaagttgaaccacacttacctagtcataggatcacatcgacaggagaagaaaatgtaatatataatggaataactgactgggtttatgaagaggaagtcttcggtgcctactctgcactgtggtggtctccaaacaacacgtttctagcttatgcccagtttaacgacacaggagtgccgctcattgaatactccttctattctgatgagtcactgcagtaccccaagacagtgtggattccatacccaaaggcaggagctgtgaatccaactgtaaagttctttattgtaaatatagactctctcagctcatcctctagtgcggctcccatccaaatccctgctcctgcatctgtggcaagaggggatcactatttatgtgatgtggtgtgggctacagaagaaagaatttcactacagtggctcaggaggattcagaactattccgtgatggctatctgtgactatgataagatcaacctaacgtggaactgtccatccgagcagcagcatgttgaaatgagtaccacaggctgggtcggaagatttaggcccgcagaacctcacttcacctctgatggaagcagcttctataagatcatcagcgacaaagatggctacaaacacatctgccacttcccgaaagataagaaagactgtacatttattacaaaaggagcctgggaagtcattagtatcgaagctctgaccagcgattatctatactacattagtaaccaatataaagaaatgccaggaggaagaaatctctataaaattcaacttactgaccacacaaatgtgaagtgccttagttgtgacctgaatccagaaagatgtcagtattatgcggtatcatttagtaaagaggcaaagtactatcagctgggatgttggggccccggtctgcccctctacactctacatcgtagcacggatcataaagagctgcgagtcctggaagacaattctgctttggatagaatgctgcaggatgtccagatgccttcaaaaaaattggacttcattgttttgaatgaaacaagattttggtatcaaatgatcttgccccctcattttgataaatccaagaaatatcctctactattagatgtatatgcaggtccctgtagtcaaaaagcagatgcttccttcagactgaactgggccacttaccttgcaagtacagaaaacatcatagtagctagctttgacggcagaggaagtggttaccaaggagataagatcatgcatgcaatcaacagaagattgggaacactggaagttgaagatcaaattgaagcagccaggcaatttgtaaaaatgggatttgtggatagcaagcgagttgcaatttggggctggtcatatggagggtatgtaacctcaatggtcctgggatcgggaagtggcgtgttcaagtgcggaatagctgtggcacctgtgtcacggtgggagtactatgactcagtgtacacagagcgttacatgggtctcccaattccagaagacaaccttgaccattacaggtattatccaacctgaaagatggttttcttggctatgtccaagcatggaaagtcctataaactcaggagctattctgcctagtgcttcaacacctgcctctggagaatgatgaatgagaagccaaagccaatttgaagagcagatgaggcagaggcttaagtccaaactctaacatcaaaattcatcaggacacttgcctcacttcctcagaacacatgccatcataccagaacacacatcatcattctgctctttctctctctctctctctctctctctctctctctctctctctctctctctctgtgtgtgtgtgtgtgtgtgtgtgtgtgtgtatgtgtaatgctatagcacaggagtttgaatctgccatttcacggctccttttccagccttttctataggctccttttgtagaccccaatcctcccttcccctggctctacctcccacagtggtggccattctcatctctccccttaggtgttccctgtatgaggtagtcgtgtaaatagaagtcacttcctcctgccaatggcaacgcacgcacattgggtgcacgaagtcagccttcctcttcactgcacagatggcacccgaggactgtttaatccttccacgccaggagtcgggttttcttggcatgaaattcattgctggcaatggacacattaaaactgccagtaccagggagctaaaggttcccaatgtgttactcagagggattatctgggagggtgatagctaaggtgggcaggagaaaagtgaggtaaatgcattgagggaattgtctccactgagccccgctccgctggttgcttcctctgagcctggaggactgaatccgcgcgcggggatcggagtctgagaggaaccctgaatctaagttgcctatttttggtgcacagcaggttttagaataaagctgccctcctttgttttttaaa

SEQ ID NO: 10 - DNA, 2739 bp, Mus musculus
  source 1..2739: mol_type = genomic DNA
ctgaagtgtcattcaaaagggaacaatcaccttttctctttctttgccagccagataacatgggacacccaaccccttctctcagactgacagacctctcagggaaggggacaagagaactggcagctagtttctgcagtgagccgtgaatctgccaaactccatgcctgcttgaacctcagctgcctcgattatccacgcaagggagcaacagttaaacctcaatgtgcaatgtctcttttagcaaagggggttcgctgttccccttatccctcactcatgggggccctgcgtgctacttcctggctcgcctagtggtcctaccgcgctgggtcggctgccccgcgctcacactgtgcaccgaagcccgccttgcgctaactaatgtttaactcaggccgaaacttggcggcgagctcagggtgactgcgtgcagagcagccgcgcaggacgtccgtctctgcgcgcagtgacttctgcctgcgctcaagcttcagagttcagtttcaaggagccgcccgaccatgaagacaccgtggaaggttcttctgggactgcttggtgtcgctgcgcttgtcaccatcatcaccgtgccaatagttctgctgagcaaagatgaagcggcagctgacagccgcagaacgtattcactagctgactatttaaagagtacctttcgggtcaagtcctactctttgtggtgggtttcagactttgaatacctctacaaacaagagaacaatatcttgctgctcaatgctgaacatggaaacagctccattttcttggagaacagtacctttgaaagctttggatatcattcagtgtcacctgaccgactgtttgttctcttggaatacaactacgtgaagcaatggagacattcctacacagcttcatacaacatttatgatgtgaataaaagacagctgatcacagaagagaagattccaaataatacacagtggatcacatggtcaccagaaggtcataagttggcatatgtctggaagaatgatatttacgttaaagttgaaccacacttacctagtcataggatcacatcgacaggagaagaaaatgtaatatataatggaataactgactgggtttatgaagaggaagtcttcggtgcctactctgcactgtggtggtctccaaacaacacgtttctagcttatgcccagtttaacgacacaggagtgccgctcattgaatactccttctattctgatgagtcactgcagtaccccaagacagtgtggattccatacccaaaggcaggagctgtgaatccaactgtaaagttctttattgtaaatatagactctctcagctcatcctctagtgcggctcccatccaaatccctgctcctgcatctgtggcaagaggggatcactatttatgtgatgtggtgtgggctacagaagaaagaatttcactacagtggctcaggaggattcagaactattccgtgatggctatctgtgactatgataagatcaacctaacgtggaactgtccatccgagcagcagcatgttgaaatgagtaccacaggctgggtcggaagatttaggcccgcagaacctcacttcacctctgatggaagcagcttctataagatcatcagcgacaaagatggctacaaacacatctgccacttcccgaaagataagaaagactgtacatttattacaaaaggagcctgggaagtcattagtatcgaagctctgaccagcgattatctatactacattagtaaccaatataaagaaatgccaggaggaagaaatctctataaaattcaacttactgaccacacaaatgtgaagtgccttagttgtgacctgaatccagaaagatgtcagtattatgcggtatcatttagtaaagaggcaaagtactatcagctgggatgttggggccccggtctgcccctctacactctacatcgtagcacggatcataaagagctgcgagtcctggaagacaattctgctttggatagaatgctgcaggatgtccagatgccttcaaaaaaattggacttcattgttttgaatgaaacaagattttggtatcaaatgatcttgccccctcattttgataaatccaagaaatatcctctactattagatgtatatgcaggtccctgtagtcaaaaagcagatgcttccttcagactgaactgggccacttaccttgcaagtacagaaaacatcatagtagctagctttgacggcagaggaagtggttaccaaggagataagatcatgcatgcaatcaacagaagattgggaacactggaagttgaagatcaaattgaagcagccaggcaatttgtaaaaatgggatttgtggatagcaagcgagttgcaatttggggctggtcatatggagggtatgtaacctcaatggtcctgggatcgggaagtggcgtgttcaagtgcggaatagctgtggcacctgtgtcacggtgggagtactatggctgtctactttgtccgtccagtgccctgatcctgagagctgagtgcagatgggtcaatgctgcagaggaggagccttcagtctgagagtgtggtctggccatctgcatctccagctgcattaacaggcattgttagctggaggagatgccttcatgagttaaggcacagtaagatgggtaaagtgatgtgatagatgtaagagatgctgttaggggaggagctgaacctcttctctcttttccta

SEQ ID NO: 11 - DNA, 4835 bp, Rattus norvegicus
  source 1..4835: mol_type = genomic DNA
gagcagaggcgcaggacgtccgtctccgcgcgcgtgacttctgcctgcgctcaagcttcagagttcagtttcaaggagccgcccaaccatgaagacaccgtggaaggttcttctgggactgcttggtgtcgctgcgcttgtcaccatcatcaccgtgccagtggttctgctgaacaaagatgaagcggccgctgatagcgcgagaacttacacactagctgactatttaaagaatacctttcgggtcaagtcctactccttgcggtgggtttcagattctgaatacctctacaagcaagaaaacaatatcttgctattcaatgctgaacacgggaacagctccattttcttggagaacagtacctttgagatctttggagattctataagtgattattcagtgtcacccgacagactgttcgttctcttagaatacaattatgtgaagcaatggagacactcctacacggcttcatacagtatttatgacttgaataaaagacagctgatcacagaagagaagattccaaataatacacagtggatcacatggtcacaagaaggtcacaaattggcatatgtctggaagaatgatatttatgttaaaattgaaccacatttgcctagtcataggatcacatcaacaggaaaagaaaatgtaatatttaacggaataaatgactgggtttatgaagaggaaatcttcggtgcctactccgcactgtggtggtctccaaacggcacttttctagcttatgcccagtttaacgacaccggagtgcctctcattgaatactccttctactctgatgagtcactgcagtaccccaagacagtctggattccgtacccaaaggcaggagctgtgaatccaactgtaaagttctttattgtaaatacagactctctcagctcaactactactacgattcccatgcaaatcaccgctcctgcatctgtgacaacaggggatcactacttgtgtgacgtggcctgggtttcagaagacagaatctcgttgcagtggctcaggaggattcagaactattccgtgatggcgatctgcgactatgataagaccaccctagtatggaactgtccaacgacgcaggagcatattgaaacgagtgccacaggctggtgcggaagatttaggcctgcagaaccccacttcacctccgacggaagcagcttctataaaatcgtcagtgacaaagatggctacaaacacatctgccagttccagaaagataggaaacccgaacaggtctgtacatttattacaaaaggagcctgggaagtcattagtatcgaagctctgaccagcgattatctgtactacattagtaatgaatataaagaaatgccaggaggaagaaatctttataaaattcagcttactgaccacacaaataagaagtgccttagttgtgacctgaatccagaaagatgccagtattactcggtgtcacttagtaaagaggcaaagtactatcagctgggatgccggggccctggtctgcccctctacactctgcatcgcagcactgatcaaaaagagctgagagtcctggaggacaattctgctttggataaaatgctgcaagatgtccaaatgccttcaaaaaaattggacttcattgttctgaatgaaacaagattttggtatcaaatgatcttacctcctcattttgataaatccaagaaataccctctactaatagatgtatatgcaggtccctgtagtcaaaaagcagatgctgccttcagactcaactgggccacttaccttgcaagcacagaaaacatcatagtagctagctttgatggcagaggaagtggttaccaaggagataagatcatgcatgcaatcaacaaaagacttggaacactggaagttgaagatcaaattgaagcagccaggcaatttttaaaaatgggatttgtggacagcaagcgagttgcaatttggggctggtcatatggagggtacgtaacctcaatggtcctgggatcgggaagtggcgtgttcaagtgtggaatagccgtggcgcccgtgtcacggtgggagtactatgactcagtatacacagagcgttacatgggtctcccaactccagaggacaaccttgaccattacaggaactcaacagtcatgagcagagctgaaaattttaagcaagttgagtacctccttattcacggtacagcagatgataatgttcactttcagcagtcagctcagatctccaaagccctggtggatgctggcgtggatttccaagcaatgtggtacacggacgaagaccatgggatcgccagcagcacagctcaccagcacatctattcccacatgagccatttcctccagcagtgcttctccttacgctagcatggcaaggctctccgcagcttactcaagagcacacttgtcctcattatctcaaaactgcactgttaagatgacgattttaataatgtcgcctcgagaaattccagcctacttcccagttttatacctgcaatcctaactaaggatgcctgtcttcagaacagattattaccttacagcaatttggatttccccctctgttttgtttatcatttaaaaccatttccacatcagctgctgaaacaacaaatataaattatttttgcaagagctatgcatagatttcctgagcagaatttcaatttttttcccccttactaggctggtccaaatcttgttcccttatttaagggggtggcaagacgtgggtaatgatgtcattaggccagcaacaagagaagcgggaacagagaatatggctagaaacccaggtccaagcatacaaacccaaccaggctactgtcagctcgcctcgagaagagctgctcactgccagactggcaccgttttctgagaaagactattcaaacagtctcaggaaatcatatatgcaaagcactgacttctaagtaaaaccacagcagttgaatagactccaaagaaatgcaagggacgctgccagcaatgtaagggccccaggtgccagttatggctataggtgctacataaacacagcaagcctgatgggaaagcatgttaaatgtgcttttaaaaattaccaagtctcctagtgagaagaggcagcttggaacatagcgacttgccccgttaaaagttgaaaatatttgtgtcacaaattctaacatgaaggaatacttgcgtcagttcttcctacttcctttctttgagcattttcattaaagcattttaacttcattatctttctaatggaaaactgtatgagaatgttttgtgttattatttctattctacacactggaatgttgcctggtcatttagcaagtatgcttccattttttcaaaggtaatgggttatatcttgaatcaaacttaaactgcattgacatatggacacatttgttcaaaggttcttgtttaacttgtgtgaaatccaagactgtcttgtaaacatggaaagagttcaacttttaaaaaaaaatttagatacataaaactgtttaaagttatatgattcataagagtttatctaatacccccagaaatttctactcacatttatcacatagcttggtcatttacatactatggaactcataatattatttaacttaggggagcacgtgaggttcgtggcacgagatggaatgctatcagcagagtagacatgtttttccagggtcttgttttttgtttttgtttctggtctcttcctgtttgggcggagggtaatataatagataatatacataatagaatacactctgatacctgacttagccgtgttttgacaacttggaaacttgattcaattatttataacacagctgaaaatttaaaatggactccacacatttaaatgcagtttcaggccaattttctaggtacaattaccacagacaggtgagctacagcataaattccaaacatggcagaaatggaaattacctataaatataaatgagtttagatattgatgagcctgatgctatttcccgggcactccactgttcccctcaccttaaggaactctcaagtcctgctcttccactgcaagcacagctggtccttaaatctacaggcctctggctacagtccgaatttgaacacagttctgtcaccgtgtgcagcagcagcagccatgtgcaaagttctagatcaaggaacaaaggtagcacatgttcctgacagtgtggaaacataaacataaatgcgaattaaatagaaattatcccttctgaattctttttgttcctttcatttctaaataggttgttcctggagcctgaattaataaaaagaacacagcacacatttttcaggcgatgagggtttcacatggtgataatgtgaatacattcagtttttatttgattctcataggtcaagttttactgttcggtaagagttgtaaattagattaaaaccctgatgcataagttgtaaacaaacttaatttaagagcaagtttgaaaagcacaagagctaataacaccactgaggcatatagacaagtctcttatgggcatatgcagctccctgaagcgcatggatcaagctaccgcctcagagcacaccagcaccaggggcgcatgctaaaggaagagctcccctccccaccccccatgcttcacgatccatgttgacttcagtctgtgccattctgggcatcatagttctccttcagattattagcagttccacctcttggcacgtactacttttgctctaagttggagtgagagtactggtttataagattactggatttgtacaatatttaagattcaataaattctaagtg

SEQ ID NO: 12 - DNA, 3596 bp, Macaca mulatta
  source 1..3596: mol_type = genomic DNA
cgggctcctcccggccggaatgccagtgccccgcgccccgcgcgcctgctccggcgccgcctgtccagcagcctacccgcggcgcctttataccctgcgggctgggcgctcactaatgtttaactctgggccgaaacttgccagcggcgagtgactccaccgcccggagcagtggagcaggacgcgcctctccgccgctggctgtgacttctgcctgcgctccttcactgaacgcacacttccgaggagacgccgacgatgaagacagcgtggaaggttctcctgggactgctgggtgctgctgcgcttgtcaccatcatcaccgtgcccgtggttctgctgaacaaaggcacagatgatgctacagctgacagtcgcaaaacttacactctaactgattacttaaaaaatacttatagactgaagttgtactccttacgatggatttcagatcatgaatatctctacaaacaagaaaataatatcttggtattcaatgctgaatatggaaacagctcggttttcttggagaacagtacatttgatgagtttggacattctataaatgattattcaatatctcctgatgggcagtttattctcttagaatacaactatgtgaagcaatggaggcattcctacacagcttcatatgacatttatgatttaaataaaaggcagctgattacagaagagaggattccaaacaacacacagtgggtcacatggtcaccagtgggtcataaattggcatatgtttggaacaatgacatttatgttaaaattgaaccaaatttaccaagtcacagaatcacatcgactgggaaagaagatatgatatataatggaataactgactgggtttatgaagaggaagtcttcagtgcctactctgctctgtggtggtctccaaacggcacttttttagcatatgcccaatttaacgacacagaagtcccacttattgaatactccttctactctgatgagtcactgcagtacccaaagactgtacaggttccatatccaaaggcaggagctgtgaatccaactgtaaagttctttgttgtaaatacagactctctcagctcagccaccaatgcaacttccatacaaatcactgcgcctgcttctatgttgataggggatcactacttgtgtgatgtgacatgggcaacacaagaaagaatttctttgcagtggctcaggaggattcagaactattcggtcatggatatttgtgattatgatgagtccagtggaagatggaactgcttagtggcacggcaacacattgaaacgagtactactggctgggttggaagatttaggccttcggaacctcattttacctctgatggtaatagcttctacaagatcattagcaatgaagaaggttacagacacatttgttattttcaaataaataaaaaaaactgcacatttattacaaaaggagcctgggaagtcatcgggatagaagctctaaccagcgattatctatactacattagtaatgaatataaaggaatgccaggaggaaggaatctttataaaatccaacttagtgactatacaaaagtgacatgccttagttgtgagctgaatccggaaaggtgtcagtactattctgtgtcattcagtaaagaggcgaagtattatcagctgagatgttccggtcctggtctgcccctctatactctacacagcagtgtgaatgataaagggccgagagtcctggaagataattcagctttggataaaatgctgcagaatgtccagatgccctccaaaacactggacttcattattttgaatgaaacaaaattttggtatcagatgatcttgcctccccattttgataaatccaagaaatatcctctactattagatgtgtatgcaggcccgtgtagtcaaaaagcagacgctgtcttcagactcaactgggccacttaccttgcaagcacagaaaacattatagtagctagctttgatggcagaggaagtggttaccaaggagataagatcatgcatgcaatcaacagaagactgggaacatttgaagttgaagatcaaattgaagcagccagacaattttcaaaaatgggatttgtggacaacaaacgaattgcaatttggggctggtcatatggagggtacgtaacctcaatggtcctgggatcgggaagcggcgtgttcaagtgtggaatagccgtggcgcctgtatcccggtgggagtactatgattcagtgtacacagaacgttacatgggtctcccaactccagaagacaaccttgaccattacaggaattcaacagtcatgagcagagctgaaaattttaaacaagttgagtacctccttattcatggaacagcagatgataacgttcactttcagcagtcagctcagatctccaaagccctggtcgatgctggagtggatttccaggcaatgtggtatactgatgaagaccatggaatcgctagcagcacagcacaccaacacatatacacccacatgagccacttcataaaacaatgtttctctttaccttagcacctcaaaacaccatgccatttaaagcttattaaaagtcatttttgttttcattatctcaaaactgcactgtcaagatgatgatcttaaaaatatacactcaaatcaagaaacttaaggttacctttgttcccaaatttcatacctatcatcttaagtagggacttctgtcttcacaacagattattaccttacagaagtttgaattatccggtcgagttttattgtttaaaatcatttccgcatcagctgctgaaacaacaaataggaattgtttttatggaagctttgcatagattccctgagcaggattttaatctttttctaactggactggttcaaatgttgttctcttctttaaaaggatggcaagatgtgggcagtgatgtcactagggcagggacaggataagagggattagggagagaagatagcagggcatggctgggaacccaagtccaagcataccaacacgagcaggctactgtcagctcccctcggagaagatctgttcacagccagactggcacagttttctgagaaagactattcaaacagtctcaggaaatcaaatatgcaaagcactgacttctaagtaaaaccacagcagttgaaaagactccaaagaaatgtaagggaaactgccagcaatgcaggcccccaggtgccagttatggctataggtgctacaaaaacacagcaagggtgatgggaaagcattgtaaatgtgctttaaaaaaaaacatactgatgttcctagtgaaagaggcagcttgaaactgagatgtgaacacatcagcttgccctgttaaaagatgaaaatatttgtattgcaaatcttaacttgaaggagtccttgcctcaatttttcttatttcatttctttgagtgtcttcattaaaagaatactttaacttccttggactcattttaaaaaatggaacataaaatagaatgttatgtattattattcccattctacatactatggaatttctcctggtcatttaataaatgtgccttcattttttcagaag

SEQ ID NO: 13 - DNA, 4078 bp, Macaca fascicularis
  source 1..4078: mol_type = genomic DNA
gttattgtcattatttttggcattttgatgagtgtgtaagcctgcaagacaatcgggaaattctctggggagggtgaatccagatactcagcttccaagggccattcatgagggaacaatcaccttttctctttgcctttcatacagctttagacacctgactgcctcctaacataactttcactggcaagagacagaggcctgggttttagtttcagttgccagcggtgagctgtgtgagtttaccaaagccctctgccctctctgggcctcggtccctcgcctgtccacgcgaggttggaggagctgaacgccgacgtccttttcagctaagagggagcagggtcctcgcgtcgccgacccagggtctgcgcatctgaggccgcgcgccctttcccctcccccacggctcctctgggcctcgcacccagcgccccggctgccgcccagcgccccgcaccgccctcagggggccctcgcgggctccccccggccggaatgcccgtgccccgcgccccgcgcgcctgctccggcgccgcctgtccagcagcctacccgcggcgcctttataccctgcgggctgggcgctcactaatgtttaactctgggccgaaacttgccagcggcgagtgactccaccgcccggagcagtggagcaggacgcgcctctccgccgccggctgtgacttctgcctgcgctccttcactgaacgcacacttccgaggagacgtcgacgatgaagacagcgtggaaggttctcctgggactgctgggtgctgctgcgcttgtcaccatcatcaccgtgcccgtggttctgctgaacaaaggcacagatgatgctacagctgacagtcgcaaaacttacactctaactgattacttaaaaaatacttatagactgaagttgtactccttacgatggatttcagatcatgaatatctctacaaacaagaaaataatatcttggtattcaatgctgaatatggaaacagctcggttttcttggagaacagtacatttgatgagtttggacattctataaatgattattcaatatctcctgatgggcagtttattctcttagaatacaactatgtgaagcaatggaggcattcctacacagcttcatatgacatttatgatttaaataaaaggcagctgattacagaagagaggattccaaacaacacacagtgggtcacatggtcaccagtgggtcataaattggcatatgtttggaacaatgacatttatgtcaaaattgaaccaaatttaccaagtcacagaatcacatcgactgggaaagaagatatgatatataatggaataactgactgggtttatgaagaggaagtcttcagtgcctactctgctctgtggtggtctccaaacggcacttttttagcatatgcccaatttaacgacacagaagtcccacttattgaatactccttctactctgatgagtcactgcagtacccaaagactgtacaggttccatatccaaaggcaggagctgtgaatccaactgtaaagttctttgttgtaaatacagactctctcagctcagccaccaatgcaacttccatacaaatcactgcgcctgcttctatgttgataggggatcactacttgtgtgatgtgacatgggcaacacaagaaagaatttctttgcagtggctcaggaggattcagaactattcggtcatggatatttgtgattatgatgagtccagtggaagatggaactgcttagtggcacggcaacacattgaaacgagtactactggctgggttggaagatttaggccttcggaacctcattttacctctgatggtaatagcttctacaagatcatcagcaatgaagaaggttacagacacatttgttattttcaaataaataaaaaaaactgcacatttattacaaaaggagcctgggaagtcatcgggatagaagctctaaccagcgattatctatactacattagtaatgaatataaaggaatgccaggaggaaggaatctttataaaatccaacttagtgactatacaaaagtgacatgccttagttgtgagctgaatccggaaaggtgtcagtactattctgtgtcattcagtaaagaggcgaagtattatcagctgagatgttccggtcctggtctgcccctctatactctacacagcagtgtgaatgataaagggccgagagtcctggaagataattcagctttggataaaatgctgcagaatgtccagatgccctccaaaacactggacttcattattttgaatgaaacaaaattttggtatcagatgatcttgcctccccattttgataaatccaagaaatatcctctactattagatgtgtatgcaggcccgtgtagtcaaaaagcagacgctgtcttcagactcaactgggccacttaccttgcaagcacagaaaacattatagtagctagctttgatggcagaggaagtggttaccaaggagataagatcatgcatgcaatcaacagaagactgggaacatttgaagttgaagatcaaattgaagcagccagacaattttcaaaaatgggatttgtggacaacaaacgaattgcaatttggggctggtcatatggagggtacgtaacctcaatggtcctgggatcgggaagcggcgtgttcaagtgtggaatagccgtggcgcctgtatcccggtgggagtactatgattcagtgtacacagaacgttacatgggtctcccaactccagaagacaaccttgaccattacaggaattcaacagtcatgagcagagctgaaaattttaaacaagttgagtacctccttattcatggaacagcagatgataacgttcactttcagcagtcagctcagatctccaaagccctggtcgatgctggagtggatttccaggcaatgtggtatactgatgaagaccatggaatcgctagcagcacagcacaccaacacatatacacccacatgagccacttcataaaacaatgtttctctttaccttagcacctcaaaacaccatgccatttaaagcttattaaaagtcatttttgttttcattatctcaaaactgcactgtcaagatgatgatcttaaaaatatacactcaaatcaagaaacttaaggttacctttgttcccaaatttcatacctatcatcttaagtagggacttctgtcttcacaacagattattaccttacagaagtttgaattatccggtcgagttttattgtttaaaatcatttccgcatcagctgctgaaacaacaaataggaattgtttttatggaagctttgcatagattccctgagcaggattttaatctttttctaactggactggttcaaatgttgttctcttctttaaaaggatggcaagatgtgggcagtgatgtcactagggcagggacaggataagagggattagggagagaagatagcagggcatggctgggaacccaagtccaagcataccaacacgagcaggctactgtcagctcccctcggagaagatctgttcacagccagactggcacagttttctgagaaagactattcaaacagtctcaggaaatcaaatatgcaaagcactgacttctaagtaaaaccacagcagttgaaaagactccaaagaaatgtaagggaaactgccagcaatgcaggcccccaggtgccagttatggctataggtgctacaaaaacacagcaagggtgatgggaaagcattgtaaatgtgctttaaaaaaaaacatactgatgttcctagtgaaagaggcagcttgaaactgagatgtgaacacatcagcttgccctgttaaaagatgaaaatatttgtattgcaaatcttaacttgaaggagtccttgcctcaatttttcttatttcatttctttgagtgtcttcattaaaagaatactttaacttccttggactcattttaaaaaatggaacataaaatagaatgttatgtattattattcccattctacatactatggaatttctcctggtcatttaataaatgtgccttcattttttcagaagtaa

SEQ ID NO: 14 - DNA, 3543 bp, Macaca fascicularis
  source 1..3543: mol_type = genomic DNA
gcgccgcctgtccagcagcctacccgcggcgcctttataccctgcgggctgggcgctcactaatgtttaactctgggccgaaacttgccagcggcgagtgactccaccgcccggagcagtggagcaggacgcgcctctccgccgccggctgtgacttctgcctgcgctccttcactgaacgcacacttccgaggagacgtcgacgatgaagacagcgtggaaggttctcctgggactgctgggtgctgctgcgcttgtcaccatcatcaccgtgcccgtggttctgctgaacaaaggcaatgatgctacagctgacagtcgcaaaacttacactctaactgattacttaaaaaatacttatagactgaagttgtactccttacgatggatttcagatcatgaatatctctacaaacaagaaaataatatcttggtattcaatgctgaatatggaaacagctcggttttcttggagaacagtacatttgatgagtttggacattctataaatgattattcaatatctcctgatgggcagtttattctcttagaatacaactatgtgaagcaatggaggcattcctacacagcttcatatgacatttatgatttaaataaaaggcagctgattacagaagagaggattccaaacaacacacagtgggtcacatggtcaccagtgggtcataaattggcatatgtttggaacaatgacatttatgtcaaaattgaaccaaatttaccaagtcacagaatcacatcgactgggaaagaagatatgatatataatggaataactgactgggtttatgaagaggaagtcttcagtgcctactctgctctgtggtggtctccaaacggcacttttttagcatatgcccaatttaacgacacagaagtcccacttattgaatactccttctactctgatgagtcactgcagtacccaaagactgtacaggttccatatccaaaggcaggagctgtgaatccaactgtaaagttctttgttgtaaatacagactctctcagctcagccaccaatgcaacttccatacaaatcactgcgcctgcttctatgttgataggggatcactacttgtgtgatgtgacatgggcaacacaagaaagaatttctttgcagtggctcaggaggattcagaactattcggtcatggatatttgtgattatgatgagtccagtggaagatggaactgcttagtggcacggcaacacattgaaacgagtactactggctgggttggaagatttaggccttcggaacctcattttacctctgatggtaatagcttctacaagatcatcagcaatgaagaaggttacagacacatttgttattttcaaataaataaaaaaaactgcacatttattacaaaaggagcctgggaagtcatcgggatagaagctctaaccagcgattatctatactacattagtaatgaatataaaggaatgccaggaggaaggaatctttataaaatccaacttagtgactatacaaaagtgacatgccttagttgtgagctgaatccggaaaggtgtcagtactattctgtgtcattcagtaaagaggcgaagtattatcagctgagatgttccggtcctggtctgcccctctatactctacacagcagtgtgaatgataaagggccgagagtcctggaagataattcagctttggataaaatgctgcagaatgtccagatgccctccaaaacactggacttcattattttgaatgaaacaaaattttggtatcagatgatcttgcctccccattttgataaatccaagaaatatcctctactattagatgtgtatgcaggcccgtgtagtcaaaaagcagacgctgtcttcagactcaactgggccacttaccttgcaagcacagaaaacattatagtagctagctttgatggcagaggaagtggttaccaaggagataagatcatgcatgcaatcaacagaagactgggaacatttgaagttgaagatcaaattgaagcagccagacaattttcaaaaatgggatttgtggacaacaaacgaattgcaatttggggctggtcatatggagggtacgtaacctcaatggtcctgggatcgggaagcggcgtgttcaagtgtggaatagccgtggcgcctgtatcccggtgggagtactatgattcagtgtacacagaacgttacatgggtctcccaactccagaagacaaccttgaccattacaggaattcaacagtcatgagcagagctgaaaattttaaacaagttgagtacctccttattcatggaacagcagatgataacgttcactttcagcagtcagctcagatctccaaagccctggtcgatgctggagtggatttccaggcaatgtggtatactgatgaagaccatggaatcgctagcagcacagcacaccaacacatatacacccacatgagccacttcataaaacaatgtttctctttaccttagcacctcaaaacaccatgccatttaaagcttattaaaagtcatttttgttttcattatctcaaaactgcactgtcaagatgatgatcttaaaaatatacactcaaatcaagaaacttaaggttacctttgttcccaaatttcatacctatcatcttaagtagggacttctgtcttcacaacagattattaccttacagaagtttgaattatccggtcgagttttattgtttaaaatcatttccgcatcagctgctgaaacaacaaataggaattgtttttatggaagctttgcatagattccctgagcaggattttaatctttttctaactggactggttcaaatgttgttctcttctttaaaaggatggcaagatgtgggcagtgatgtcactagggcagggacaggataagagggattagggagagaagatagcagggcatggctgggaacccaagtccaagcataccaacacgagcaggctactgtcagctcccctcggagaagatctgttcacagccagactggcacagttttctgagaaagactattcaaacagtctcaggaaatcaaatatgcaaagcactgacttctaagtaaaaccacagcagttgaaaagactccaaagaaatgtaagggaaactgccagcaatgcaggcccccaggtgccagttatggctataggtgctacaaaaacacagcaagggtgatgggaaagcattgtaaatgtgctttaaaaaaaaacatactgatgttcctagtgaaagaggcagcttgaaactgagatgtgaacacatcagcttgccctgttaaaagatgaaaatatttgtattgcaaatcttaacttgaaggagtccttgcctcaatttttcttatttcatttctttgagtgtcttcattaaaagaatactttaacttccttggactcattttaaaaaatggaacataaaatagaatgttatgtattattattcccattctacatactatggaatttctcctggtcatttaataaatgtgccttcattttttcagaagtaa

SEQ ID NO: 15 - DNA, 3245 bp, Macaca fascicularis
  source 1..3245: mol_type = genomic DNA
cacgcatagaattctggggatttttttcattacctttgaaatcacgagtactgtcatttctcaacctgttggactatttctacagcatatggcaaagtggatctttctctccttcttgaaatgctccctgccttgactactttttagtctcctttgatgattcctcttcctctgcccatatttttaaatgatgagtttggacattctataaatgattattcaatatctcctgatgggcagtttattctcttagaatacaactatgtgaagcaatggaggcattcctacacagcttcatatgacatttatgatttaaataaaaggcagctgattacagaagagaggattccaaacaacacacagtgggtcacatggtcaccagtgggtcataaattggcatatgtttggaacaatgacatttatgtcaaaattgaaccaaatttaccaagtcacagaatcacatcgactgggaaagaagatatgatatataatggaataactgactgggtttatgaagaggaagtcttcagtgcctactctgctctgtggtggtctccaaacggcacttttttagcatatgcccaatttaacgacacagaagtcccacttattgaatactccttctactctgatgagtcactgcagtacccaaagactgtacaggttccatatccaaaggcaggagctgtgaatccaactgtaaagttctttgttgtaaatacagactctctcagctcagccaccaatgcaacttccatacaaatcactgcgcctgcttctatgttgataggggatcactacttgtgtgatgtgacatgggcaacacaagaaagaatttctttgcagtggctcaggaggattcagaactattcggtcatggatatttgtgattatgatgagtccagtggaagatggaactgcttagtggcacggcaacacattgaaacgagtactactggctgggttggaagatttaggccttcggaacctcattttacctctgatggtaatagcttctacaagatcatcagcaatgaagaaggttacagacacatttgttattttcaaataaataaaaaaaactgcacatttattacaaaaggagcctgggaagtcatcgggatagaagctctaaccagcgattatctatactacattagtaatgaatataaaggaatgccaggaggaaggaatctttataaaatccaacttagtgactatacaaaagtgacatgccttagttgtgagctgaatccggaaaggtgtcagtactattctgtgtcattcagtaaagaggcgaagtattatcagctgagatgttccggtcctggtctgcccctctatactctacacagcagtgtgaatgataaagggccgagagtcctggaagataattcagctttggataaaatgctgcagaatgtccagatgccctccaaaacactggacttcattattttgaatgaaacaaaattttggtatcagatgatcttgcctccccattttgataaatccaagaaatatcctctactattagatgtgtatgcaggcccgtgtagtcaaaaagcagacgctgtcttcagactcaactgggccacttaccttgcaagcacagaaaacattatagtagctagctttgatggcagaggaagtggttaccaaggagataagatcatgcatgcaatcaacagaagactgggaacatttgaagttgaagatcaaattgaagcagccagacaattttcaaaaatgggatttgtggacaacaaacgaattgcaatttggggctggtcatatggagggtacgtaacctcaatggtcctgggatcgggaagcggcgtgttcaagtgtggaatagccgtggcgcctgtatcccggtgggagtactatgattcagtgtacacagaacgttacatgggtctcccaactccagaagacaaccttgaccattacaggaattcaacagtcatgagcagagctgaaaattttaaacaagttgagtacctccttattcatggaacagcagatgataacgttcactttcagcagtcagctcagatctccaaagccctggtcgatgctggagtggatttccaggcaatgtggtatactgatgaagaccatggaatcgctagcagcacagcacaccaacacatatacacccacatgagccacttcataaaacaatgtttctctttaccttagcacctcaaaacaccatgccatttaaagcttattaaaagtcatttttgttttcattatctcaaaactgcactgtcaagatgatgatcttaaaaatatacactcaaatcaagaaacttaaggttacctttgttcccaaatttcatacctatcatcttaagtagggacttctgtcttcacaacagattattaccttacagaagtttgaattatccggtcgagttttattgtttaaaatcatttccgcatcagctgctgaaacaacaaataggaattgtttttatggaagctttgcatagattccctgagcaggattttaatctttttctaactggactggttcaaatgttgttctcttctttaaaaggatggcaagatgtgggcagtgatgtcactagggcagggacaggataagagggattagggagagaagatagcagggcatggctgggaacccaagtccaagcataccaacacgagcaggctactgtcagctcccctcggagaagatctgttcacagccagactggcacagttttctgagaaagactattcaaacagtctcaggaaatcaaatatgcaaagcactgacttctaagtaaaaccacagcagttgaaaagactccaaagaaatgtaagggaaactgccagcaatgcaggcccccaggtgccagttatggctataggtgctacaaaaacacagcaagggtgatgggaaagcattgtaaatgtgctttaaaaaaaaacatactgatgttcctagtgaaagaggcagcttgaaactgagatgtgaacacatcagcttgccctgttaaaagatgaaaatatttgtattgcaaatcttaacttgaaggagtccttgcctcaatttttcttatttcatttctttgagtgtcttcattaaaagaatactttaacttccttggactcattttaaaaaatggaacataaaatagaatgttatgtattattattcccattctacatactatggaatttctcctggtcatttaataaatgtgccttcattttttcagaagtaa

SEQ ID NO: 16 - DNA, 3573 bp, Homo sapiens
  source 1..3573: mol_type = genomic DNA
ttctgaaaaaatgaaggcacatttattaaatgactgggagaaattccatagtatgtagaatgggaataataatacataacattgtattttatgttccattttttaaaatgagtccaaggaagttaaaatattcttttaattaagacactcaaagaaatgaaataagaaaaattgatgcaaggactccttcaagttaagatttgtgatacaaatattttcatcttttaacagggcaagctgatgtgttcacatctcagtttcaagctgcctctttcactaggaacatcagtatttttttttaaaagcacatttacaatgctttcccatcacccttgctgtgtttttgtagcacctatagccataactggcacctgggggcctgcgttgctggcagtttcccttacatttctttggagtcttttcaactgctgtggttttacttagaagtcagtgctttgcatatttgatttcctgagactgtttgaatagtctttctcagaaaactgtgccagtctggctgtgaacagctcttctccgaggggagctgacagtagcctgctcgtgttggtatgcttggacttgggttcccagccatgccctgctatcttctctccctaatccctcttatcctgtccctgccctagtgacatcactgcccacatcttgccatccctttaaagaagagaacaacatttgaaccagtccagttagaaaaagattaaaatcctgctcagggaatctatgcaaagcctccataaaaacaattcctatttgttgtttcagcagctgatgcagaaatgattttaaacaataaaacccgaccggataattcaaacttctgtaaggtaataatctgttgtgaagacagaagtccctacttaagatgataggtatgaaatttgggaacaaaggtaaccttaagtttcttgatttgagtgtgtattttaaagatcatcatcatcttgacagtgcagttttgagataatgaaaacaaaaatgagttttaataagctttaaatggcatggtattttgaggtgctaaggtaaagagaaacattgttttatgaagtggctcatgtgggtatatatatgttggtgtgctgtgctgctagctattccatggtcttcatcagtataccacattgcctggaaatccactccaacatcgaccagggctttggagatctgagctgactgctgaaagtgaacgttatcatctgctgttccatgaataaggaggtactcaacttgtttaaaattttcagctctgctcatgactgttgaatttctgtaatggtcaaggttgtcttctggagttgggagacccatgtaacgttctgtgtacactgagtcatagtactcccaccgggatacaggcgccacggctattccacacttgaacacgccacttcccgatcccaggaccattgaggttacgtaccctccatatgaccagccccaaattgcaattcgtttgttgtccacaaatcccatttttgaaaattgtctggctgcttcaatttgatcttcaacttcaaatgttcccagtcttctgttgattgcatgcatgatcttatctccttggtaaccacttcctctgccatcaaagctagctactataatgttttctgtgcttgcaaggtaagtggcccagttcagtctgaagacagtgtctgctttttgactacatgggcctgcatacacatctaatagtagaggatatttcttggatttatcaaaatgaggaggcaagatcatctgataccaaaattttgtttcattcaaaataatgaagtccagttttttggagggcatctggacattctgcagcattttatccaaagctgaattgtcttccaggactctcagccctttatcattcacgctgctgtgtagagtatagaggggcagaccaggaccggaacatctcagctgataatacttcgcctctttactgaatgacacagaatagtactgacacctttccggattcagctcacaactgaggcatgtcacttttgtatagtcactaagttggattttataaagattccttcctcctggcattcctttatattcattactaatgtagtatagataatcactggttagagcttctatcccgatgacttcccaggtgccttttgtaataaatgtgcagtcttttttatctatttggaaatagcaaatgtgtctgtaaccttcttcattgctgatgatcttgtagaagctattaccatcaagggtaaaatgaggttctgaaggcctaaatcttccaacccagccagtagtactcatttcaatgtgttgccgtgccactaagcagttccatcttccactggattcatcatagtcacaaatatccatgaccgaatagttctgaatcctcctgagccactgcaaagaaattctttcttgtgttgcccatgtcacatcacacaagtagtgatcccctatcaacatagaagcaggagcagtgatttgtatggaagttgcattggtgactgagctgagagagtctgtatttacaacaaagaactttacagttggattcacagctcctgcctttggatatggaacccgtacagtctttgggtactgcagtgactcatcagagtagaaggagtattcaataagtgggacttctgtgtcgttaaattgggcatatgctaaaaaagtgccgtttggagaccaccacagagcagagtaggcactgaagacttcctcttcataaacccagtcagttattccattatatattatatcttctttccccgtccatgtgattctgtaacttggtaaatttggttcaattttaacataaatgtcattgttccaaacatatgccaatttatgacccactggtgaccatgtgacccactgtgtgttgtttggaatcctctcttctgtaatcagctgccttttatttaaatcataaatgtcatatgaagctgtgtaggaatgcctccattgcttcacgtagttgtattctaagagaataaactgcccatcaggagatattgaataatcattgatagaatgtccaaactcatcaaatgtactgttctccaagaaaactgagctgtttccatattcagcattgaataccaagatattattttcttgtttgtagagatattcatgatctgaaatccatcttaaggagtataacttcagtctataagtattttttaagtaatcagttagagtgtaagttttgcgactgtcagctgtagcatcatctgtgcctttgttcagcagaaccacgggcacggtgatgatggtgacaagcgcagcagcacccagcagtcccagaagaaccttccacggtgtcttcatcgtcggcgtctcctcggaagtgagcgttcagagaaggagcgcaggcagaagtcaccgcgggcggcggagacgcgcgtcctgcaccgctgctccgggcggtggagtcactcgccgctggcaagtttcggccccgagttaaacattagtgagcgccgagcccgctgggtataaaggcgccgcgggcaggctgcagggcaggcggcgcgggagcaggcgcgcgtggcgcggggcact

SEQ ID NO: 17 - DNA, 3570 bp, Homo sapiens
  source 1..3570: mol_type = genomic DNA
ttctgaaaaaatgaaggcacatttattaaatgactgggagaaattccatagtatgtagaatgggaataataatacataacattgtattttatgttccattttttaaaatgagtccaaggaagttaaaatattcttttaattaagacactcaaagaaatgaaataagaaaaattgatgcaaggactccttcaagttaagatttgtgatacaaatattttcatcttttaacagggcaagctgatgtgttcacatctcagtttcaagctgcctctttcactaggaacatcagtatttttttttaaaagcacatttacaatgctttcccatcacccttgctgtgtttttgtagcacctatagccataactggcacctgggggcctgcgttgctggcagtttcccttacatttctttggagtcttttcaactgctgtggttttacttagaagtcagtgctttgcatatttgatttcctgagactgtttgaatagtctttctcagaaaactgtgccagtctggctgtgaacagctcttctccgaggggagctgacagtagcctgctcgtgttggtatgcttggacttgggttcccagccatgccctgctatcttctctccctaatccctcttatcctgtccctgccctagtgacatcactgcccacatcttgccatccctttaaagaagagaacaacatttgaaccagtccagttagaaaaagattaaaatcctgctcagggaatctatgcaaagcctccataaaaacaattcctatttgttgtttcagcagctgatgcagaaatgattttaaacaataaaacccgaccggataattcaaacttctgtaaggtaataatctgttgtgaagacagaagtccctacttaagatgataggtatgaaatttgggaacaaaggtaaccttaagtttcttgatttgagtgtgtattttaaagatcatcatcatcttgacagtgcagttttgagataatgaaaacaaaaatgagttttaataagctttaaatggcatggtattttgaggtgctaaggtaaagagaaacattgttttatgaagtggctcatgtgggtatatatatgttggtgtgctgtgctgctagctattccatggtcttcatcagtataccacattgcctggaaatccactccaacatcgaccagggctttggagatctgagctgactgctgaaagtgaacgttatcatctgctgttccatgaataaggaggtactcaacttgtttaaaattttcagctctgctcatgactgttgaatttctgtaatggtcaaggttgtcttctggagttgggagacccatgtaacgttctgtgtacactgagtcatagtactcccaccgggatacaggcgccacggctattccacacttgaacacgccacttcccgatcccaggaccattgaggttacgtaccctccatatgaccagccccaaattgcaattcgtttgttgtccacaaatcccatttttgaaaattgtctggctgcttcaatttgatcttcaacttcaaatgttcccagtcttctgttgattgcatgcatgatcttatctccttggtaaccacttcctctgccatcaaagctagctactataatgttttctgtgcttgcaaggtaagtggcccagttcagtctgaagacagtgtctgctttttgactacatgggcctgcatacacatctaatagtagaggatatttcttggatttatcaaaatgaggaggcaagatcatctgataccaaaattttgtttcattcaaaataatgaagtccagttttttggagggcatctggacattctgcagcattttatccaaagctgaattgtcttccaggactctcagccctttatcattcacgctgctgtgtagagtatagaggggcagaccaggaccggaacatctcagctgataatacttcgcctctttactgaatgacacagaatagtactgacacctttccggattcagctcacaactgaggcatgtcacttttgtatagtcactaagttggattttataaagattccttcctcctggcattcctttatattcattactaatgtagtatagataatcactggttagagcttctatcccgatgacttcccaggtgccttttgtaataaatgtgcagtcttttttatctatttggaaatagcaaatgtgtctgtaaccttcttcattgctgatgatcttgtagaagctattaccatcaagggtaaaatgaggttctgaaggcctaaatcttccaacccagccagtagtactcatttcaatgtgttgccgtgccactaagcagttccatcttccactggattcatcatagtcacaaatatccatgaccgaatagttctgaatcctcctgagccactgcaaagaaattctttcttgtgttgcccatgtcacatcacacaagtagtgatcccctatcaacatagaagcaggagcagtgatttgtatggaagttgcattggtgactgagctgagagagtctgtatttacaacaaagaactttacagttggattcacagctcctgcctttggatatggaacccgtacagtctttgggtactgcagtgactcatcagagtagaaggagtattcaataagtgggacttctgtgtcgttaaattgggcatatgctaaaaaagtgccgtttggagaccaccacagagcagagtaggcactgaagacttcctcttcataaacccagtcagttattccattatatattatatcttctttccccgtccatgtgattctgtaacttggtaaatttggttcaattttaacataaatgtcattgttccaaacatatgccaatttatgacccactggtgaccatgtgacccactgtgtgttgtttggaatcctctcttctgtaatcagctgccttttatttaaatcataaatgtcatatgaagctgtgtaggaatgcctccattgcttcacgtagttgtattctaagagaataaactgcccatcaggagatattgaataatcattgatagaatgtccaaactcatcaaatgtactgttctccaagaaaactgagctgtttccatattcagcattgaataccaagatattattttcttgtttgtagagatattcatgatctgaaatccatcttaaggagtataacttcagtctataagtattttttaagtaatcagttagagtgtaagttttgcgactgtcagctgtagcatcattgcctttgttcagcagaaccacgggcacggtgatgatggtgacaagcgcagcagcacccagcagtcccagaagaaccttccacggtgtcttcatcgtcggcgtctcctcggaagtgagcgttcagagaaggagcgcaggcagaagtcaccgcgggcggcggagacgcgcgtcctgcaccgctgctccgggcggtggagtcactcgccgctggcaagtttcggccccgagttaaacattagtgagcgccgagcccgctgggtataaaggcgccgcgggcaggctgcagggcaggcggcgcgggagcaggcgcgcgtggcgcggggcact

SEQ ID NO: 18 - DNA, 3567 bp, Homo sapiens
  source 1..3567: mol_type = genomic DNA
ttctgaaaaaatgaaggcacatttattaaatgactgggagaaattccatagtatgtagaatgggaataataatacataacattgtattttatgttccattttttaaaatgagtccaaggaagttaaaatattcttttaattaagacactcaaagaaatgaaataagaaaaattgatgcaaggactccttcaagttaagatttgtgatacaaatattttcatcttttaacagggcaagctgatgtgttcacatctcagtttcaagctgcctctttcactaggaacatcagtatttttttttaaaagcacatttacaatgctttcccatcacccttgctgtgtttttgtagcacctatagccataactggcacctgggggcctgcgttgctggcagtttcccttacatttctttggagtcttttcaactgctgtggttttacttagaagtcagtgctttgcatatttgatttcctgagactgtttgaatagtctttctcagaaaactgtgccagtctggctgtgaacagctcttctccgaggggagctgacagtagcctgctcgtgttggtatgcttggacttgggttcccagccatgccctgctatcttctctccctaatccctcttatcctgtccctgccctagtgacatcactgcccacatcttgccatccctttaaagaagagaacaacatttgaaccagtccagttagaaaaagattaaaatcctgctcagggaatctatgcaaagcctccataaaaacaattcctatttgttgtttcagcagctgatgcagaaatgattttaaacaataaaacccgaccggataattcaaacttctgtaaggtaataatctgttgtgaagacagaagtccctacttaagatgataggtatgaaatttgggaacaaaggtaaccttaagtttcttgatttgagtgtgtattttaaagatcatcatcatcttgacagtgcagttttgagataatgaaaacaaaaatgagttttaataagctttaaatggcatggtattttgaggtgctaaggtaaagagaaacattgttttatgaagtggctcatgtgggtatatatatgttggtgtgctgtgctgctagctattccatggtcttcatcagtataccacattgcctggaaatccactccaacatcgaccagggctttggagatctgagctgactgctgaaagtgaacgttatcatctgctgttccatgaataaggaggtactcaacttgtttaaaattttcagctctgctcatgactgttgaatttctgtaatggtcaaggttgtcttctggagttgggagacccatgtaacgttctgtgtacactgagtcatagtactcccaccgggatacaggcgccacggctattccacacttgaacacgccacttcccgatcccaggaccattgaggttacgtaccctccatatgaccagccccaaattgcaattcgtttgttgtccacaaatcccatttttgaaaattgtctggctgcttcaatttgatcttcaacttcaaatgttcccagtcttctgttgattgcatgcatgatcttatctccttggtaaccacttcctctgccatcaaagctagctactataatgttttctgtgcttgcaaggtaagtggcccagttcagtctgaagacagtgtctgctttttgactacatgggcctgcatacacatctaatagtagaggatatttcttggatttatcaaaatgaggaggcaagatcatctgataccaaaattttgtttcattcaaaataatgaagtccagttttttggagggcatctggacattctgcagcattttatccaaagctgaattgtcttccaggactctcagccctttatcattcacgctgctgtgtagagtatagaggggcagaccaggaccggaacatctcagctgataatacttcgcctctttactgaatgacacagaatagtactgacacctttccggattcagctcacaactgaggcatgtcacttttgtatagtcactaagttggattttataaagattccttcctcctggcattcctttatattcattactaatgtagtatagataatcactggttagagcttctatcccgatgacttcccaggtgccttttgtaataaatgtgcagtcttttttatctatttggaaatagcaaatgtgtctgtaaccttcttcattgctgatgatcttgtagaagctattaccatcaagggtaaaatgaggttctgaaggcctaaatcttccaacccagccagtagtactcatttcaatgtgttgccgtgccactaagcagttccatcttccactggattcatcatagtcacaaatatccatgaccgaatagttctgaatcctcctgagccactgcaaagaaattctttcttgtgttgcccatgtcacatcacacaagtagtgatcccctatcaacatagaagcaggagcagtgatttgtatggaagttgcattggtgactgagctgagagagtctgtatttacaacaaagaactttacagttggattcacagctcctgcctttggatatggaacccgtacagtctttgggtactgcagtgactcatcagagtagaaggagtattcaataagtgggacttctgtgtcgttaaattgggcatatgctaaaaaagtgccgtttggagaccaccacagagcagagtaggcactgaagacttcctcttcataaacccagtcagttattccattatatattatatcttctttccccgtccatgtgattctgtaacttggtaaatttggttcaattttaacataaatgtcattgttccaaacatatgccaatttatgacccactggtgaccatgtgacccactgtgtgttgtttggaatcctctcttctgtaatcagctgccttttatttaaatcataaatgtcatatgaagctgtgtaggaatgcctccattgcttcacgtagttgtattctaagagaataaactgcccatcaggagatattgaataatcattgatagaatgtccaaactcatcaaatgtactgttctccaagaaaactgagctgtttccatattcagcattgaataccaagatattattttcttgtttgtagagatattcatgatctgaaatccatcttaaggagtataacttcagtctataagtattttttaagtaatcagttagagtgtaagttttgcgactgtcagctgtagcatcatctttgttcagcagaaccacgggcacggtgatgatggtgacaagcgcagcagcacccagcagtcccagaagaaccttccacggtgtcttcatcgtcggcgtctcctcggaagtgagcgttcagagaaggagcgcaggcagaagtcaccgcgggcggcggagacgcgcgtcctgcaccgctgctccgggcggtggagtcactcgccgctggcaagtttcggccccgagttaaacattagtgagcgccgagcccgctgggtataaaggcgccgcgggcaggctgcagggcaggcggcgcgggagcaggcgcgcgtggcgcggggcact

SEQ ID NO: 19 - DNA, 3519 bp, Homo sapiens
  source 1..3519: mol_type = genomic DNA
ttctgaaaaaatgaaggcacatttattaaatgactgggagaaattccatagtatgtagaatgggaataataatacataacattgtattttatgttccattttttaaaatgagtccaaggaagttaaaatattcttttaattaagacactcaaagaaatgaaataagaaaaattgatgcaaggactccttcaagttaagatttgtgatacaaatattttcatcttttaacagggcaagctgatgtgttcacatctcagtttcaagctgcctctttcactaggaacatcagtatttttttttaaaagcacatttacaatgctttcccatcacccttgctgtgtttttgtagcacctatagccataactggcacctgggggcctgcgttgctggcagtttcccttacatttctttggagtcttttcaactgctgtggttttacttagaagtcagtgctttgcatatttgatttcctgagactgtttgaatagtctttctcagaaaactgtgccagtctggctgtgaacagctcttctccgaggggagctgacagtagcctgctcgtgttggtatgcttggacttgggttcccagccatgccctgctatcttctctccctaatccctcttatcctgtccctgccctagtgacatcactgcccacatcttgccatccctttaaagaagagaacaacatttgaaccagtccagttagaaaaagattaaaatcctgctcagggaatctatgcaaagcctccataaaaacaattcctatttgttgtttcagcagctgatgcagaaatgattttaaacaataaaacccgaccggataattcaaacttctgtaaggtaataatctgttgtgaagacagaagtccctacttaagatgataggtatgaaatttgggaacaaaggtaaccttaagtttcttgatttgagtgtgtattttaaagatcatcatcatcttgacagtgcagttttgagataatgaaaacaaaaatgagttttaataagctttaaatggcatggtattttgaggtgctaaggtaaagagaaacattgttttatgaagtggctcatgtgggtatatatatgttggtgtgctgtgctgctagctattccatggtcttcatcagtataccacattgcctggaaatccactccaacatcgaccagggctttggagatctgagctgactgctgaaagtgaacgttatcatctgctgttccatgaataaggaggtactcaacttgtttaaaattttcagctctgctcatgactgttgaatttctgtaatggtcaaggttgtcttctggagttgggagacccatgtaacgttctgtgtacactgagtcatagtactcccaccgggatacaggcgccacggctattccacacttgaacacgccacttcccgatcccaggaccattgaggttacgtaccctccatatgaccagccccaaattgcaattcgtttgttgtccacaaatcccatttttgaaaattgtctggctgcttcaatttgatcttcaacttcaaatgttcccagtcttctgttgattgcatgcatgatcttatctccttggtaaccacttcctctgccatcaaagctagctactataatgttttctgtgcttgcaaggtaagtggcccagttcagtctgaagacagtgtctgctttttgactacatgggcctgcatacacatctaatagtagaggatatttcttggatttatcaaaatgaggaggcaagatcatctgataccaaaattttgtttcattcaaaataatgaagtccagttttttggagggcatctggacattctgcagcattttatccaaagctgaattgtcttccaggactctcagccctttatcattcacgctgctgtgtagagtatagaggggcagaccaggaccggaacatctcagctgataatacttcgcctctttactgaatgacacagaatagtactgacacctttccggattcagctcacaactgaggcatgtcacttttgtatagtcactaagttggattagataatcactggttagagcttctatcccgatgacttcccaggtgccttttgtaataaatgtgcagtcttttttatctatttggaaatagcaaatgtgtctgtaaccttcttcattgctgatgatcttgtagaagctattaccatcaagggtaaaatgaggttctgaaggcctaaatcttccaacccagccagtagtactcatttcaatgtgttgccgtgccactaagcagttccatcttccactggattcatcatagtcacaaatatccatgaccgaatagttctgaatcctcctgagccactgcaaagaaattctttcttgtgttgcccatgtcacatcacacaagtagtgatcccctatcaacatagaagcaggagcagtgatttgtatggaagttgcattggtgactgagctgagagagtctgtatttacaacaaagaactttacagttggattcacagctcctgcctttggatatggaacccgtacagtctttgggtactgcagtgactcatcagagtagaaggagtattcaataagtgggacttctgtgtcgttaaattgggcatatgctaaaaaagtgccgtttggagaccaccacagagcagagtaggcactgaagacttcctcttcataaacccagtcagttattccattatatattatatcttctttccccgtccatgtgattctgtaacttggtaaatttggttcaattttaacataaatgtcattgttccaaacatatgccaatttatgacccactggtgaccatgtgacccactgtgtgttgtttggaatcctctcttctgtaatcagctgccttttatttaaatcataaatgtcatatgaagctgtgtaggaatgcctccattgcttcacgtagttgtattctaagagaataaactgcccatcaggagatattgaataatcattgatagaatgtccaaactcatcaaatgtactgttctccaagaaaactgagctgtttccatattcagcattgaataccaagatattattttcttgtttgtagagatattcatgatctgaaatccatcttaaggagtataacttcagtctataagtattttttaagtaatcagttagagtgtaagttttgcgactgtcagctgtagcatcatctgtgcctttgttcagcagaaccacgggcacggtgatgatggtgacaagcgcagcagcacccagcagtcccagaagaaccttccacggtgtcttcatcgtcggcgtctcctcggaagtgagcgttcagagaaggagcgcaggcagaagtcaccgcgggcggcggagacgcgcgtcctgcaccgctgctccgggcggtggagtcactcgccgctggcaagtttcggccccgagttaaacattagtgagcgccgagcccgctgggtataaaggcgccgcgggcaggctgcagggcaggcggcgcgggagcaggcgcgcgtggcgcggggcact

SEQ ID NO: 20 - DNA, 3417 bp, Homo sapiens
  source 1..3417: mol_type = genomic DNA
ttacttctgaaaaaatgaaggcacatttattaaatgactgggagaaattccatagtatgtagaatgggaataataatacataacattgtattttatgttccattttttaaaatgagtccaaggaagttaaaatattcttttaattaagacactcaaagaaatgaaataagaaaaattgatgcaaggactccttcaagttaagatttgtgatacaaatattttcatcttttaacagggcaagctgatgtgttcacatctcagtttcaagctgcctctttcactaggaacatcagtatttttttttaaaagcacatttacaatgctttcccatcacccttgctgtgtttttgtagcacctatagccataactggcacctgggggcctgcgttgctggcagtttcccttacatttctttggagtcttttcaactgctgtggttttacttagaagtcagtgctttgcatatttgatttcctgagactgtttgaatagtctttctcagaaaactgtgccagtctggctgtgaacagctcttctccgaggggagctgacagtagcctgctcgtgttggtatgcttggacttgggttcccagccatgccctgctatcttctctccctaatccctcttatcctgtccctgccctagtgacatcactgcccacatcttgccatccctttaaagaagagaacaacatttgaaccagtccagttagaaaaagattaaaatcctgctcagggaatctatgcaaagcctccataaaaacaattcctatttgttgtttcagcagctgatgcagaaatgattttaaacaataaaacccgaccggataattcaaacttctgtaaggtaataatctgttgtgaagacagaagtccctacttaagatgataggtatgaaatttgggaacaaaggtaaccttaagtttcttgatttgagtgtgtattttaaagatcatcatcatcttgacagtgcagttttgagataatgaaaacaaaaatgagttttaataagctttaaatggcatggtattttgaggtgctaaggtaaagagaaacattgttttatgaagtggctcatgtgggtatatatatgttggtgtgctgtgctgctagctattccatggtcttcatcagtataccacattgcctggaaatccactccaacatcgaccagggctttggagatctgagctgactgctgaaagtgaacgttatcatctgctgttccatgaataaggaggtactcaacttgtttaaaattttcagctctgctcatgactgttgaatttctgtaatggtcaaggttgtcttctggagttgggagacccatgtaacgttctgtgtacactgagtcatagtactcccaccgggatacaggcgccacggctattccacacttgaacacgccacttcccgatcccaggaccattgaggttacgtaccctccatatgaccagccccaaattgcaattcgtttgttgtccacaaatcccatttttgaaaattgtctggctgcttcaatttgatcttcaacttcaaatgttcccagtcttctgttgattgcatgcatgatcttatctccttggtaaccacttcctctgccatcaaagctagctactataatgttttctgtgcttgcaaggtaagtggcccagttcagtctgaagacagtgtctgctttttgactacatgggcctgcatacacatctaatagtagaggatatttcttggatttatcaaaatgaggaggcaagatcatctgataccaaaattttgtttcattcaaaataatgaagtccagttttttggagggcatctggacattctgcagcattttatccaaagctgaattgtcttccaggactctcagccctttatcattcacgctgctgtgtagagtatagaggggcagaccaggaccggaacatctcagctgataatacttcgcctctttactgaatgacacagaatagtactgacacctttccggattcagctcacaactgaggcatgtcacttttgtatagtcactaagttggattttataaagattccttcctcctggcattcctttatattcattactaatgtagtatagataatcactggttagagcttctatcccgatgacttcccaggtgccttttgtaataaatgtgcagtcttttttatctatttggaaatagcaaatgtgtctgtaaccttcttcattgctgatgatcttgtagaagctattaccatcaagggtaaaatgaggttctgaaggcctaaatcttccaacccagccagtagtactcatttcaatgtgttgccgtgccactaagcagttccatcttccactggattcatcatagtcacaaatatccatgaccgaatagttctgaatcctcctgagccactgcaaagaaattctttcttgtgttgcccatgtcacatcacacaagtagtgatcccctatcaacatagaagcaggagcagtgatttgtatggaagttgcattggtgactgagctgagagagtctgtatttacaacaaagaactttacagttggattcacagctcctgcctttggatatggaacccgtacagtctttgggtactgcagtgactcatcagagtagaaggagtattcaataagtgggacttctgtgtcgttaaattgggcatatgctaaaaaagtgccgtttggagaccaccacagagcagagtaggcactgaagacttcctcttcataaacccagtcagttattccattatatattatatcttctttccccgtccatgtgattctgtaacttggtaaatttggttcaattttaacataaatgtcattgttccaaacatatgccaatttatgacccactggtgaccatgtgacccactgtgtgttgtttggaatcctctcttctgtaatcagctgccttttatttaaatcataaatgtcatatgaagctgtgtaggaatgcctccattgcttcacgtagttgtattctaagagaataaactgcccatcaggagatattgaataatcattgatagaatgtccaaactcatcaaatgtactgttctccaagaaaactgagctgtttccatattcagcattgaataccaagatattattttcttgtttgtagagatattcatgatctgaaatccatcttaaggagtataacttcagtctataagtattttttaagtaatcagttagagtgtaagttttgcgactgtcagctgtagcatcattgcctttgttcagcagaaccacgggcacggtgatgatggtgacaagcgcagcagcacccagcagtcccagaagaaccttccacggtgtcttcatcgtcggcgtctcctcggaagtgagcgttcagagaaggagcgcaggcagaagtcaccgcgggcggcggagacgcgcgt

SEQ ID NO: 21 - DNA, 5268 bp, Mus musculus
  source 1..5268: mol_type = genomic DNA
tgttttttcacttagaatttattgaatcttaaatattgtacaaatctagtaattttataaaccggcattctcactccaacttagagcaagagcaataagcgccaagaggtggaactgctaatactccgagaaccacagtgcccggaatggcacagactgaagtgatcctggatagtgaagcgtcagggcggccttcccttagcgcatgcgcccctgatgctggtgtgctctgagaaggaagctcgatccatgtgcttccagagaatgcatatgtccctcagagacaggtctatgtcccttagtgacgttactagctcttgtgcttttcaaacttactcttgagttcacttagaacttccgcatcaggttcttaatctaattcacaactcttacggaacagtaaaacttgtgctatgagagtcaaataaaaactgaatttattcacattatcaccatttgaaaccatcattgcctgaaaaatgtgtgctgtgatatttgattaattcaggctccagaaacaacatatttagaaacaaaaggaacacaaaattcatggtttggctattatataaatattatgtgatacatcatataagatatattaataaaatctagattattatataatggggtttagattgatgaattcacaacgggtaatttctgtttatgttttcacactgacaggaacatgtcacctctgtcccttgatctagaactttgcaggtggatactgctgcacatggtgaaagtgctgtattctaaaataggattatagccagaaacctacaggcttacttaccagcagtgcttgcaatggaagaataggacttgagacttacttaaggtggagtgaatccgtgggggggcctgggaagtggcatcaagctcatgaatatctaatcccacccttatttgataggtagtttccatttctgccacgtttgcaattcatgctgtggctcacctgtccagaataattttatctagcactctggtctgaaactgcatttaaatgtgtgaagtccattttaaaaatgcagttgtgttataaataattgaaacaaaacgtagtattttctaagttatccaaacattgctaagtcaagttcaatatcagaatgtatgttttctattatatcacccccccacaagaagagaccagagacaaaacaatacagaaaaccctggaaagacaagtcaaccaaaacgactctgctgatagtgttctgtcccatgctgtgagcctcacatgctcccctagattaaattatattatgaattccatagtatttaaatgaccaaattattgttaattgatttctccaaagctatgtgataagtgtgaaaatagacatttcagggggtattagagaaacccctatgaatcatttaagtttaaacagttttatgtatctaattttttttaaaaaaaagctgaactctttccatgtttacaagacagtcttggatgtctaacaagttaaacaagaacctttgaacaaatgtgtccatatgtcaatgcggtgtaagtttgattcaagacataacccattacctctgaaaaatggaagcatatttactaaatgaccaggcaaagttccagtgtgtagaatagaaataataacacaaaacattctcatttaattttccattaaaaagctaatgaagttaaaatattttaattaaaatgctcaaagaaatgaagtaggaaaaactaatgcaagtattccttcatgttagaatttgtgacacaaatattttcaacttttaacagggcaagtcgatatgttccaagctgcctcttttcactaggagacatcggtaattttcaaaagcacatttacaatgctttcccatcacccttgctgtgtttttgtagcacctatagccataactggcacctggggcccttacattgctggcagcgtcccttgcatttctttggagtctattcaactgctgtggttttacttagaagtcagtgctttgcatatatgatttcctgagactgtttgaatagtctttctcagaaaactgtgccagtctggcagtgaacagctcttctcgaggcgagctgacagtagcctggttggtttgtatgcttggacctgggtttctagccatactccctgctccctcttctcttgttgctgccctaatgacatcattacccacatcttgtcacccacttaaataagggaaacgagatttggaccagtctagtaaggaaaaaaaaaattgaaattctgctcaggaaatctatgcatagctcttgcaaaaataatttatatttgttgtttcagcagctgatgtggaaatgattttaaatgataaacaaaacagaggggaaaatccaaattgctctaaggtagtaatctgttctggggacaggcatccttagttaggattgcaggtgtaaaactggagaaagcagcctgaaatgtctcaatgcaacattattaagatcttcatcttaacagtgcacttttgagataatgagaacaaatgtggtcttaaataagctatggagagctatgctgtgctagtgtaaggagaagcactgctggaggaaatggctcatgtgggaatagatgtgctggtgagctgtgctgctagcgatcccgtggtcttcatccgtgtaccacattgcttggaaatccacaccagcatccaccagggctttggagatctgagctgactgctgaaagtgaacattatcatctgccgttccatgaataaggaggtactcaacttgtttaaaatgttcagctctgctcatgactgttgagttcctgtaatggtcaaggttgtcttctggaattgggagacccatgtaacgctctgtgtacactgagtcatagtactcccaccgtgacacaggtgccacagctattccgcacttgaacacgccacttcccgatcccaggaccattgaggttacataccctccatatgaccagccccaaattgcaactcgcttgctatccacaaatcccatttttacaaattgcctggctgcttcaatttgatcttcaacttccagtgttcccaatcttctgttgattgcatgcatgatcttatctccttggtaaccacttcctctgccgtcaaagctagctactatgatgttttctgtacttgcaaggtaagtggcccagttcagtctgaaggaagcatctgctttttgactacagggacctgcatatacatctaatagtagaggatatttcttggatttatcaaaatgagggggcaagatcatttgataccaaaatcttgtttcattcaaaacaatgaagtccaatttttttgaaggcatctggacatcctgcagcattctatccaaagcagaattgtcttccaggactcgcagctctttatgatccgtgctacgatgtagagtgtagaggggcagaccggggccccaacatcccagctgatagtactttgcctctttactaaatgataccgcataatactgacatctttctggattcaggtcacaactaaggcacttcacatttgtgtggtcagtaagttgaattttatagagatttcttcctcctggcatttctttatattggttactaatgtagtatagataatcgctggtcagagcttcgatactaatgacttcccaggctccttttgtaataaatgtacagtctttcttatctttcgggaagtggcagatgtgtttgtagccatctttgtcgctgatgatcttatagaagctgcttccatcagaggtgaagtgaggttctgcgggcctaaatcttccgacccagcctgtggtactcatttcaacatgctgctgctcggatggacagttccacgttaggttgatcttatcatagtcacagatagccatcacggaatagttctgaatcctcctgagccactgtagtgaaattctttcttctgtagcccacaccacatcacataaatagtgatcccctcttgccacagatgcaggagcagggatttggatgggagccgcactagaggatgagctgagagagtctatatttacaataaagaactttacagttggattcacagctcctgcctttgggtatggaatccacactgtcttggggtactgcagtgactcatcagaatagaaggagtattcaatgagcggcactcctgtgtcgttaaactgggcataagctagaaacgtgttgtttggagaccaccacagtgcagagtaggcaccgaagacttcctcttcataaacccagtcagttattccattatatattacattttcttctcctgtcgatgtgatcctatgactaggtaagtgtggttcaactttaacgtaaatatcattcttccagacatatgccaacttatgaccttctggtgaccatgtgatccactgtgtattatttggaatcttctcttctgtgatcagctgtcttttattcacatcataaatgttgtatgaagctgtgtaggaatgtctccattgcttcacgtagttgtattccaagagaacaaacagtcggtcaggtgacactgaatgatatccaaagctttcaaaggtactgttctccaagaaaatggagctgtttccatgttcagcattgagcagcaagatattgttctcttgtttgtagaggtattcaaagtctgaaacccaccacaaagagtaggacttgacccgaaaggtactctttaaatagtcagctagtgaatacgttctgcggctgtcagctgccgcttcatctttgctcagcagaactattggcacggtgatgatggtgacaagcgcagcgacaccaagcagtcccagaagaaccttccacggtgtcttcatggtcgggcggctccttgaaactgaactctgaagcttgagcgcaggcagaagtcactgcgcgcagagacggacgtcctgcgcggctgctctgcacgcagtcaccctgagctcgccgccaagtttcggcctgagttaaacattagttagcgcaaggcgggcttcggtgcacagtgtgagcgcggggcagccgacccagcgcggtaggaccactaggcgagccaggaagtagcacgcagggcccccatgagtgagggataaggggaacagcgaaccccctttgctaaaagagacattgcacattgaggtttaactgttgctcccttgcgtggataatcgaggcagctgaggttcaagcaggcatggagtttggcagattcacggctcactgcagaaactagctgccagttctcttgtccccttccctgagaggtctgtcagtc

SEQ ID NO: 22 - DNA, 3654 bp, Mus musculus
  source 1..3654: mol_type = genomic DNA
gaagccaaaagacaaatgttttatttaccaacatttaaattttacactggaaattaagaactctgtatatctgacatttatgtcaggcaggtacatattcctgagacataagttaattttaatcatgcctcaagtattatataactttgctttaaacatggaaaaaacaaacctcaacttcttctgagaatctggtccaaaatatatggcaggttttctcagtacaaaataaaaaatccactcttacataggtgggcactattgaagcggagcacacagctaattatgtgtcagaagtggagggacactattttctagccaaaacagttaagaaagttgtgttgttttatagcattgtattattagtgcaagatgcacatatatatatatatatatatatatatatatatatatatatatatatatatatatatgtatgtatgtataaagtctgatgaagaattctaatgaagaagatgagttagactaaatacccaaaacctcctctatacaggcaaacccagccccagccatttctgactttataaacaagcctaattgtttgctgcctgcagttgttcaacaaaagataatgtagcgactgcaagagctgaagcatgctaactattaataccccactgttgttaggatggctagtaatcataataacagaatggattttacatttcagctattatcatgctggtttcactttagaattactctgccacacatttacagaataagtgattactttcgaatcaaaacagggagagactgaaccatcacaggaatagaagaatggtgttttgacactcccaggatatgtaatactgtgtttctcaacctcaaactgtctaatatttactctgtgtatgactcaaggatagcacgtctccaacttcacagcggaatgataaggggcctctcttctcttcctgtcatctgagacttccttgggaaaaagtaactgccaaaggggaaactagacccactagatattttgttccccctgaacaaagtcttagtataccattgcttggaaatccacaccagcatccaccagggctttggagatctgagctgactgctgaaagtgaacattatcatctgccgttccatgaataaggaggtactcaacttgtttaaaatgttcagctctgctcatgactgttgagttcctgtaatggtcaaggttgtcttctggaattgggagacccatgtaacgctctgtgtacactgagtcatagtactcccaccgtgacacaggtgccacagctattccgcacttgaacacgccacttcccgatcccaggaccattgaggttacataccctccatatgaccagccccaaattgcaactcgcttgctatccacaaatcccatttttacaaattgcctggctgcttcaatttgatcttcaacttccagtgttcccaatcttctgttgattgcatgcatgatcttatctccttggtaaccacttcctctgccgtcaaagctagctactatgatgttttctgtacttgcaaggtaagtggcccagttcagtctgaaggaagcatctgctttttgactacagggacctgcatatacatctaatagtagaggatatttcttggatttatcaaaatgagggggcaagatcatttgataccaaaatcttgtttcattcaaaacaatgaagtccaatttttttgaaggcatctggacatcctgcagcattctatccaaagcagaattgtcttccaggactcgcagctctttatgatccgtgctacgatgtagagtgtagaggggcagaccggggccccaacatcccagctgatagtactttgcctctttactaaatgataccgcataatactgacatctttctggattcaggtcacaactaaggcacttcacatttgtgtggtcagtaagttgaattttatagagatttcttcctcctggcatttctttatattggttactaatgtagtatagataatcgctggtcagagcttcgatactaatgacttcccaggctccttttgtaataaatgtacagtctttcttatctttcgggaagtggcagatgtgtttgtagccatctttgtcgctgatgatcttatagaagctgcttccatcagaggtgaagtgaggttctgcgggcctaaatcttccgacccagcctgtggtactcatttcaacatgctgctgctcggatggacagttccacgttaggttgatcttatcatagtcacagatagccatcacggaatagttctgaatcctcctgagccactgtagtgaaattctttcttctgtagcccacaccacatcacataaatagtgatcccctcttgccacagatgcaggagcagggatttggatgggagccgcactagaggatgagctgagagagtctatatttacaataaagaactttacagttggattcacagctcctgcctttgggtatggaatccacactgtcttggggtactgcagtgactcatcagaatagaaggagtattcaatgagcggcactcctgtgtcgttaaactgggcataagctagaaacgtgttgtttggagaccaccacagtgcagagtaggcaccgaagacttcctcttcataaacccagtcagttattccattatatattacattttcttctcctgtcgatgtgatcctatgactaggtaagtgtggttcaactttaacgtaaatatcattcttccagacatatgccaacttatgaccttctggtgaccatgtgatccactgtgtattatttggaatcttctcttctgtgatcagctgtcttttattcacatcataaatgttgtatgaagctgtgtaggaatgtctccattgcttcacgtagttgtattccaagagaacaaacagtcggtcaggtgacactgaatgatatccaaagctttcaaaggtactgttctccaagaaaatggagctgtttccatgttcagcattgagcagcaagatattgttctcttgtttgtagaggtattcaaagtctgaaacccaccacaaagagtaggacttgacccgaaaggtactctttaaatagtcagctagtgaatacgttctgcggctgtcagctgccgcttcatctttgctcagcagaactattggcacggtgatgatggtgacaagcgcagcgacaccaagcagtcccagaagaaccttccacggtgtcttcatggtcgggcggctccttgaaactgaactctgaagcttgagcgcaggcagaagtcactgcgcgcagagacggacgtcctgcgcggctgctctgcacgcagtcaccctgagctcgccgccaagtttcggcctgagttaaacattagttagcgcaaggcgggcttcggtgcacagtgtgagcgcggggcagccgacccagcgcggtaggaccactaggcgagccaggaagtagcacgcagggcccccatgagtgagggataaggggaacagcgaaccccctttgctaaaagagacattgcacattgaggtttaactgttgctcccttgcgtggataatcgaggcagctgaggttcaagcaggcatggagtttggcagattcacggctcactgcagaaactagctgccagttctcttgtccccttccctgagaggtctgtcagtc

SEQ ID NO: 23 - DNA, 2998 bp, Mus musculus
  source 1..2998: mol_type = genomic DNA
tttaaaaaacaaaggagggcagctttattctaaaacctgctgtgcaccaaaaataggcaacttagattcagggttcctctcagactccgatccccgcgcgcggattcagtcctccaggctcagaggaagcaaccagcggagcggggctcagtggagacaattccctcaatgcatttacctcacttttctcctgcccaccttagctatcaccctcccagataatccctctgagtaacacattgggaacctttagctccctggtactggcagttttaatgtgtccattgccagcaatgaatttcatgccaagaaaacccgactcctggcgtggaaggattaaacagtcctcgggtgccatctgtgcagtgaagaggaaggctgacttcgtgcacccaatgtgcgtgcgttgccattggcaggaggaagtgacttctatttacacgactacctcatacagggaacaccctgtaatggtcaaggttgtcttctggaattgggagacccatgtaacgctctgtgtacactgagtcatagtactcccaccgtgacacaggtgccacagctattccgcacttgaacacgccacttcccgatcccaggaccattgaggttacataccctccatatgaccagccccaaattgcaactcgcttgctatccacaaatcccatttttacaaattgcctggctgcttcaatttgatcttcaacttccagtgttcccaatcttctgttgattgcatgcatgatcttatctccttggtaaccacttcctctgccgtcaaagctagctactatgatgttttctgtacttgcaaggtaagtggcccagttcagtctgaaggaagcatctgctttttgactacagggacctgcatatacatctaatagtagaggatatttcttggatttatcaaaatgagggggcaagatcatttgataccaaaatcttgtttcattcaaaacaatgaagtccaatttttttgaaggcatctggacatcctgcagcattctatccaaagcagaattgtcttccaggactcgcagctctttatgatccgtgctacgatgtagagtgtagaggggcagaccggggccccaacatcccagctgatagtactttgcctctttactaaatgataccgcataatactgacatctttctggattcaggtcacaactaaggcacttcacatttgtgtggtcagtaagttgaattttatagagatttcttcctcctggcatttctttatattggttactaatgtagtatagataatcgctggtcagagcttcgatactaatgacttcccaggctccttttgtaataaatgtacagtctttcttatctttcgggaagtggcagatgtgtttgtagccatctttgtcgctgatgatcttatagaagctgcttccatcagaggtgaagtgaggttctgcgggcctaaatcttccgacccagcctgtggtactcatttcaacatgctgctgctcggatggacagttccacgttaggttgatcttatcatagtcacagatagccatcacggaatagttctgaatcctcctgagccactgtagtgaaattctttcttctgtagcccacaccacatcacataaatagtgatcccctcttgccacagatgcaggagcagggatttggatgggagccgcactagaggatgagctgagagagtctatatttacaataaagaactttacagttggattcacagctcctgcctttgggtatggaatccacactgtcttggggtactgcagtgactcatcagaatagaaggagtattcaatgagcggcactcctgtgtcgttaaactgggcataagctagaaacgtgttgtttggagaccaccacagtgcagagtaggcaccgaagacttcctcttcataaacccagtcagttattccattatatattacattttcttctcctgtcgatgtgatcctatgactaggtaagtgtggttcaactttaacgtaaatatcattcttccagacatatgccaacttatgaccttctggtgaccatgtgatccactgtgtattatttggaatcttctcttctgtgatcagctgtcttttattcacatcataaatgttgtatgaagctgtgtaggaatgtctccattgcttcacgtagttgtattccaagagaacaaacagtcggtcaggtgacactgaatgatatccaaagctttcaaaggtactgttctccaagaaaatggagctgtttccatgttcagcattgagcagcaagatattgttctcttgtttgtagaggtattcaaagtctgaaacccaccacaaagagtaggacttgacccgaaaggtactctttaaatagtcagctagtgaatacgttctgcggctgtcagctgccgcttcatctttgctcagcagaactattggcacggtgatgatggtgacaagcgcagcgacaccaagcagtcccagaagaaccttccacggtgtcttcatggtcgggcggctccttgaaactgaactctgaagcttgagcgcaggcagaagtcactgcgcgcagagacggacgtcctgcgcggctgctctgcacgcagtcaccctgagctcgccgccaagtttcggcctgagttaaacattagttagcgcaaggcgggcttcggtgcacagtgtgagcgcggggcagccgacccagcgcggtaggaccactaggcgagccaggaagtagcacgcagggcccccatgagtgagggataaggggaacagcgaaccccctttgctaaaagagacattgcacattgaggtttaactgttgctcccttgcgtggataatcgaggcagctgaggttcaagcaggcatggagtttggcagattcacggctcactgcagaaactagctgccagttctcttgtccccttccctgagaggtctgtcagtctgagagaaggggttgggtgtcccatgttatctggctggcaaagaaagagaaaaggtgatt

SEQ ID NO: 24 - DNA, 3481 bp, Mus musculus
  source 1..3481: mol_type = genomic DNA
tttaaaaaacaaaggagggcagctttattctaaaacctgctgtgcaccaaaaataggcaacttagattcagggttcctctcagactccgatccccgcgcgcggattcagtcctccaggctcagaggaagcaaccagcggagcggggctcagtggagacaattccctcaatgcatttacctcacttttctcctgcccaccttagctatcaccctcccagataatccctctgagtaacacattgggaacctttagctccctggtactggcagttttaatgtgtccattgccagcaatgaatttcatgccaagaaaacccgactcctggcgtggaaggattaaacagtcctcgggtgccatctgtgcagtgaagaggaaggctgacttcgtgcacccaatgtgcgtgcgttgccattggcaggaggaagtgacttctatttacacgactacctcatacagggaacacctaaggggagagatgagaatggccaccactgtgggaggtagagccaggggaagggaggattggggtctacaaaaggagcctatagaaaaggctggaaaaggagccgtgaaatggcagattcaaactcctgtgctatagcattacacatacacacacacacacacacacacacacacacagagagagagagagagagagagagagagagagagagagagagagagagagaaagagcagaatgatgatgtgtgttctggtatgatggcatgtgttctgaggaagtgaggcaagtgtcctgatgaattttgatgttagagtttggacttaagcctctgcctcatctgctcttcaaattggctttggcttctcattcatcattctccagaggcaggtgttgaagcactaggcagaatagctcctgagtttataggactttccatgcttggacatagccaagaaaaccatctttcaggttggataatacctgtaatggtcaaggttgtcttctggaattgggagacccatgtaacgctctgtgtacactgagtcatagtactcccaccgtgacacaggtgccacagctattccgcacttgaacacgccacttcccgatcccaggaccattgaggttacataccctccatatgaccagccccaaattgcaactcgcttgctatccacaaatcccatttttacaaattgcctggctgcttcaatttgatcttcaacttccagtgttcccaatcttctgttgattgcatgcatgatcttatctccttggtaaccacttcctctgccgtcaaagctagctactatgatgttttctgtacttgcaaggtaagtggcccagttcagtctgaaggaagcatctgctttttgactacagggacctgcatatacatctaatagtagaggatatttcttggatttatcaaaatgagggggcaagatcatttgataccaaaatcttgtttcattcaaaacaatgaagtccaatttttttgaaggcatctggacatcctgcagcattctatccaaagcagaattgtcttccaggactcgcagctctttatgatccgtgctacgatgtagagtgtagaggggcagaccggggccccaacatcccagctgatagtactttgcctctttactaaatgataccgcataatactgacatctttctggattcaggtcacaactaaggcacttcacatttgtgtggtcagtaagttgaattttatagagatttcttcctcctggcatttctttatattggttactaatgtagtatagataatcgctggtcagagcttcgatactaatgacttcccaggctccttttgtaataaatgtacagtctttcttatctttcgggaagtggcagatgtgtttgtagccatctttgtcgctgatgatcttatagaagctgcttccatcagaggtgaagtgaggttctgcgggcctaaatcttccgacccagcctgtggtactcatttcaacatgctgctgctcggatggacagttccacgttaggttgatcttatcatagtcacagatagccatcacggaatagttctgaatcctcctgagccactgtagtgaaattctttcttctgtagcccacaccacatcacataaatagtgatcccctcttgccacagatgcaggagcagggatttggatgggagccgcactagaggatgagctgagagagtctatatttacaataaagaactttacagttggattcacagctcctgcctttgggtatggaatccacactgtcttggggtactgcagtgactcatcagaatagaaggagtattcaatgagcggcactcctgtgtcgttaaactgggcataagctagaaacgtgttgtttggagaccaccacagtgcagagtaggcaccgaagacttcctcttcataaacccagtcagttattccattatatattacattttcttctcctgtcgatgtgatcctatgactaggtaagtgtggttcaactttaacgtaaatatcattcttccagacatatgccaacttatgaccttctggtgaccatgtgatccactgtgtattatttggaatcttctcttctgtgatcagctgtcttttattcacatcataaatgttgtatgaagctgtgtaggaatgtctccattgcttcacgtagttgtattccaagagaacaaacagtcggtcaggtgacactgaatgatatccaaagctttcaaaggtactgttctccaagaaaatggagctgtttccatgttcagcattgagcagcaagatattgttctcttgtttgtagaggtattcaaagtctgaaacccaccacaaagagtaggacttgacccgaaaggtactctttaaatagtcagctagtgaatacgttctgcggctgtcagctgccgcttcatctttgctcagcagaactattggcacggtgatgatggtgacaagcgcagcgacaccaagcagtcccagaagaaccttccacggtgtcttcatggtcgggcggctccttgaaactgaactctgaagcttgagcgcaggcagaagtcactgcgcgcagagacggacgtcctgcgcggctgctctgcacgcagtcaccctgagctcgccgccaagtttcggcctgagttaaacattagttagcgcaaggcgggcttcggtgcacagtgtgagcgcggggcagccgacccagcgcggtaggaccactaggcgagccaggaagtagcacgcagggcccccatgagtgagggataaggggaacagcgaaccccctttgctaaaagagacattgcacattgaggtttaactgttgctcccttgcgtggataatcgaggcagctgaggttcaagcaggcatggagtttggcagattcacggctcactgcagaaactagctgccagttctcttgtccccttccctgagaggtctgtcagtctgagagaaggggttgggtgtcccatgttatctggctggcaaagaaagagaaaaggtgatt

SEQ ID NO: 25 - DNA, 2739 bp, Mus musculus
  source 1..2739: mol_type = genomic DNA
taggaaaagagagaagaggttcagctcctcccctaacagcatctcttacatctatcacatcactttacccatcttactgtgccttaactcatgaaggcatctcctccagctaacaatgcctgttaatgcagctggagatgcagatggccagaccacactctcagactgaaggctcctcctctgcagcattgacccatctgcactcagctctcaggatcagggcactggacggacaaagtagacagccatagtactcccaccgtgacacaggtgccacagctattccgcacttgaacacgccacttcccgatcccaggaccattgaggttacataccctccatatgaccagccccaaattgcaactcgcttgctatccacaaatcccatttttacaaattgcctggctgcttcaatttgatcttcaacttccagtgttcccaatcttctgttgattgcatgcatgatcttatctccttggtaaccacttcctctgccgtcaaagctagctactatgatgttttctgtacttgcaaggtaagtggcccagttcagtctgaaggaagcatctgctttttgactacagggacctgcatatacatctaatagtagaggatatttcttggatttatcaaaatgagggggcaagatcatttgataccaaaatcttgtttcattcaaaacaatgaagtccaatttttttgaaggcatctggacatcctgcagcattctatccaaagcagaattgtcttccaggactcgcagctctttatgatccgtgctacgatgtagagtgtagaggggcagaccggggccccaacatcccagctgatagtactttgcctctttactaaatgataccgcataatactgacatctttctggattcaggtcacaactaaggcacttcacatttgtgtggtcagtaagttgaattttatagagatttcttcctcctggcatttctttatattggttactaatgtagtatagataatcgctggtcagagcttcgatactaatgacttcccaggctccttttgtaataaatgtacagtctttcttatctttcgggaagtggcagatgtgtttgtagccatctttgtcgctgatgatcttatagaagctgcttccatcagaggtgaagtgaggttctgcgggcctaaatcttccgacccagcctgtggtactcatttcaacatgctgctgctcggatggacagttccacgttaggttgatcttatcatagtcacagatagccatcacggaatagttctgaatcctcctgagccactgtagtgaaattctttcttctgtagcccacaccacatcacataaatagtgatcccctcttgccacagatgcaggagcagggatttggatgggagccgcactagaggatgagctgagagagtctatatttacaataaagaactttacagttggattcacagctcctgcctttgggtatggaatccacactgtcttggggtactgcagtgactcatcagaatagaaggagtattcaatgagcggcactcctgtgtcgttaaactgggcataagctagaaacgtgttgtttggagaccaccacagtgcagagtaggcaccgaagacttcctcttcataaacccagtcagttattccattatatattacattttcttctcctgtcgatgtgatcctatgactaggtaagtgtggttcaactttaacgtaaatatcattcttccagacatatgccaacttatgaccttctggtgaccatgtgatccactgtgtattatttggaatcttctcttctgtgatcagctgtcttttattcacatcataaatgttgtatgaagctgtgtaggaatgtctccattgcttcacgtagttgtattccaagagaacaaacagtcggtcaggtgacactgaatgatatccaaagctttcaaaggtactgttctccaagaaaatggagctgtttccatgttcagcattgagcagcaagatattgttctcttgtttgtagaggtattcaaagtctgaaacccaccacaaagagtaggacttgacccgaaaggtactctttaaatagtcagctagtgaatacgttctgcggctgtcagctgccgcttcatctttgctcagcagaactattggcacggtgatgatggtgacaagcgcagcgacaccaagcagtcccagaagaaccttccacggtgtcttcatggtcgggcggctccttgaaactgaactctgaagcttgagcgcaggcagaagtcactgcgcgcagagacggacgtcctgcgcggctgctctgcacgcagtcaccctgagctcgccgccaagtttcggcctgagttaaacattagttagcgcaaggcgggcttcggtgcacagtgtgagcgcggggcagccgacccagcgcggtaggaccactaggcgagccaggaagtagcacgcagggcccccatgagtgagggataaggggaacagcgaaccccctttgctaaaagagacattgcacattgaggtttaactgttgctcccttgcgtggataatcgaggcagctgaggttcaagcaggcatggagtttggcagattcacggctcactgcagaaactagctgccagttctcttgtccccttccctgagaggtctgtcagtctgagagaaggggttgggtgtcccatgttatctggctggcaaagaaagagaaaaggtgattgttcccttttgaatgacacttcag

SEQ ID NO: 26 - DNA, 4835 bp, Rattus norvegicus
  source 1..4835: mol_type = genomic DNA
cacttagaatttattgaatcttaaatattgtacaaatccagtaatcttataaaccagtactctcactccaacttagagcaaaagtagtacgtgccaagaggtggaactgctaataatctgaaggagaactatgatgcccagaatggcacagactgaagtcaacatggatcgtgaagcatggggggtggggaggggagctcttcctttagcatgcgcccctggtgctggtgtgctctgaggcggtagcttgatccatgcgcttcagggagctgcatatgcccataagagacttgtctatatgcctcagtggtgttattagctcttgtgcttttcaaacttgctcttaaattaagtttgtttacaacttatgcatcagggttttaatctaatttacaactcttaccgaacagtaaaacttgacctatgagaatcaaataaaaactgaatgtattcacattatcaccatgtgaaaccctcatcgcctgaaaaatgtgtgctgtgttctttttattaattcaggctccaggaacaacctatttagaaatgaaaggaacaaaaagaattcagaagggataatttctatttaattcgcatttatgtttatgtttccacactgtcaggaacatgtgctacctttgttccttgatctagaactttgcacatggctgctgctgctgcacacggtgacagaactgtgttcaaattcggactgtagccagaggcctgtagatttaaggaccagctgtgcttgcagtggaagagcaggacttgagagttccttaaggtgaggggaacagtggagtgcccgggaaatagcatcaggctcatcaatatctaaactcatttatatttataggtaatttccatttctgccatgtttggaatttatgctgtagctcacctgtctgtggtaattgtacctagaaaattggcctgaaactgcatttaaatgtgtggagtccattttaaattttcagctgtgttataaataattgaatcaagtttccaagttgtcaaaacacggctaagtcaggtatcagagtgtattctattatgtatattatctattatattaccctccgcccaaacaggaagagaccagaaacaaaaacaaaaaacaagaccctggaaaaacatgtctactctgctgatagcattccatctcgtgccacgaacctcacgtgctcccctaagttaaataatattatgagttccatagtatgtaaatgaccaagctatgtgataaatgtgagtagaaatttctgggggtattagataaactcttatgaatcatataactttaaacagttttatgtatctaaatttttttttaaaagttgaactctttccatgtttacaagacagtcttggatttcacacaagttaaacaagaacctttgaacaaatgtgtccatatgtcaatgcagtttaagtttgattcaagatataacccattacctttgaaaaaatggaagcatacttgctaaatgaccaggcaacattccagtgtgtagaatagaaataataacacaaaacattctcatacagttttccattagaaagataatgaagttaaaatgctttaatgaaaatgctcaaagaaaggaagtaggaagaactgacgcaagtattccttcatgttagaatttgtgacacaaatattttcaacttttaacggggcaagtcgctatgttccaagctgcctcttctcactaggagacttggtaatttttaaaagcacatttaacatgctttcccatcaggcttgctgtgtttatgtagcacctatagccataactggcacctggggcccttacattgctggcagcgtcccttgcatttctttggagtctattcaactgctgtggttttacttagaagtcagtgctttgcatatatgatttcctgagactgtttgaatagtctttctcagaaaacggtgccagtctggcagtgagcagctcttctcgaggcgagctgacagtagcctggttgggtttgtatgcttggacctgggtttctagccatattctctgttcccgcttctcttgttgctggcctaatgacatcattacccacgtcttgccacccccttaaataagggaacaagatttggaccagcctagtaagggggaaaaaaattgaaattctgctcaggaaatctatgcatagctcttgcaaaaataatttatatttgttgtttcagcagctgatgtggaaatggttttaaatgataaacaaaacagagggggaaatccaaattgctgtaaggtaataatctgttctgaagacaggcatccttagttaggattgcaggtataaaactgggaagtaggctggaatttctcgaggcgacattattaaaatcgtcatcttaacagtgcagttttgagataatgaggacaagtgtgctcttgagtaagctgcggagagccttgccatgctagcgtaaggagaagcactgctggaggaaatggctcatgtgggaatagatgtgctggtgagctgtgctgctggcgatcccatggtcttcgtccgtgtaccacattgcttggaaatccacgccagcatccaccagggctttggagatctgagctgactgctgaaagtgaacattatcatctgctgtaccgtgaataaggaggtactcaacttgcttaaaattttcagctctgctcatgactgttgagttcctgtaatggtcaaggttgtcctctggagttgggagacccatgtaacgctctgtgtatactgagtcatagtactcccaccgtgacacgggcgccacggctattccacacttgaacacgccacttcccgatcccaggaccattgaggttacgtaccctccatatgaccagccccaaattgcaactcgcttgctgtccacaaatcccatttttaaaaattgcctggctgcttcaatttgatcttcaacttccagtgttccaagtcttttgttgattgcatgcatgatcttatctccttggtaaccacttcctctgccatcaaagctagctactatgatgttttctgtgcttgcaaggtaagtggcccagttgagtctgaaggcagcatctgctttttgactacagggacctgcatatacatctattagtagagggtatttcttggatttatcaaaatgaggaggtaagatcatttgataccaaaatcttgtttcattcagaacaatgaagtccaatttttttgaaggcatttggacatcttgcagcattttatccaaagcagaattgtcctccaggactctcagctctttttgatcagtgctgcgatgcagagtgtagaggggcagaccagggccccggcatcccagctgatagtactttgcctctttactaagtgacaccgagtaatactggcatctttctggattcaggtcacaactaaggcacttcttatttgtgtggtcagtaagctgaattttataaagatttcttcctcctggcatttctttatattcattactaatgtagtacagataatcgctggtcagagcttcgatactaatgacttcccaggctccttttgtaataaatgtacagacctgttcgggtttcctatctttctggaactggcagatgtgtttgtagccatctttgtcactgacgattttatagaagctgcttccgtcggaggtgaagtggggttctgcaggcctaaatcttccgcaccagcctgtggcactcgtttcaatatgctcctgcgtcgttggacagttccatactagggtggtcttatcatagtcgcagatcgccatcacggaatagttctgaatcctcctgagccactgcaacgagattctgtcttctgaaacccaggccacgtcacacaagtagtgatcccctgttgtcacagatgcaggagcggtgatttgcatgggaatcgtagtagtagttgagctgagagagtctgtatttacaataaagaactttacagttggattcacagctcctgcctttgggtacggaatccagactgtcttggggtactgcagtgactcatcagagtagaaggagtattcaatgagaggcactccggtgtcgttaaactgggcataagctagaaaagtgccgtttggagaccaccacagtgcggagtaggcaccgaagatttcctcttcataaacccagtcatttattccgttaaatattacattttcttttcctgttgatgtgatcctatgactaggcaaatgtggttcaattttaacataaatatcattcttccagacatatgccaatttgtgaccttcttgtgaccatgtgatccactgtgtattatttggaatcttctcttctgtgatcagctgtcttttattcaagtcataaatactgtatgaagccgtgtaggagtgtctccattgcttcacataattgtattctaagagaacgaacagtctgtcgggtgacactgaataatcacttatagaatctccaaagatctcaaaggtactgttctccaagaaaatggagctgttcccgtgttcagcattgaatagcaagatattgttttcttgcttgtagaggtattcagaatctgaaacccaccgcaaggagtaggacttgacccgaaaggtattctttaaatagtcagctagtgtgtaagttctcgcgctatcagcggccgcttcatctttgttcagcagaaccactggcacggtgatgatggtgacaagcgcagcgacaccaagcagtcccagaagaaccttccacggtgtcttcatggttgggcggctccttgaaactgaactctgaagcttgagcgcaggcagaagtcacgcgcgcggagacggacgtcctgcgcctctgctc

SEQ ID NO: 27 - DNA, 3596 bp, Macaca mulatta
  source 1..3596: mol_type = genomic DNA
cttctgaaaaaatgaaggcacatttattaaatgaccaggagaaattccatagtatgtagaatgggaataataatacataacattctattttatgttccattttttaaaatgagtccaaggaagttaaagtattcttttaatgaagacactcaaagaaatgaaataagaaaaattgaggcaaggactccttcaagttaagatttgcaatacaaatattttcatcttttaacagggcaagctgatgtgttcacatctcagtttcaagctgcctctttcactaggaacatcagtatgtttttttttaaagcacatttacaatgctttcccatcacccttgctgtgtttttgtagcacctatagccataactggcacctgggggcctgcattgctggcagtttcccttacatttctttggagtcttttcaactgctgtggttttacttagaagtcagtgctttgcatatttgatttcctgagactgtttgaatagtctttctcagaaaactgtgccagtctggctgtgaacagatcttctccgaggggagctgacagtagcctgctcgtgttggtatgcttggacttgggttcccagccatgccctgctatcttctctccctaatccctcttatcctgtccctgccctagtgacatcactgcccacatcttgccatccttttaaagaagagaacaacatttgaaccagtccagttagaaaaagattaaaatcctgctcagggaatctatgcaaagcttccataaaaacaattcctatttgttgtttcagcagctgatgcggaaatgattttaaacaataaaactcgaccggataattcaaacttctgtaaggtaataatctgttgtgaagacagaagtccctacttaagatgataggtatgaaatttgggaacaaaggtaaccttaagtttcttgatttgagtgtatatttttaagatcatcatcttgacagtgcagttttgagataatgaaaacaaaaatgacttttaataagctttaaatggcatggtgttttgaggtgctaaggtaaagagaaacattgttttatgaagtggctcatgtgggtgtatatgtgttggtgtgctgtgctgctagcgattccatggtcttcatcagtataccacattgcctggaaatccactccagcatcgaccagggctttggagatctgagctgactgctgaaagtgaacgttatcatctgctgttccatgaataaggaggtactcaacttgtttaaaattttcagctctgctcatgactgttgaattcctgtaatggtcaaggttgtcttctggagttgggagacccatgtaacgttctgtgtacactgaatcatagtactcccaccgggatacaggcgccacggctattccacacttgaacacgccgcttcccgatcccaggaccattgaggttacgtaccctccatatgaccagccccaaattgcaattcgtttgttgtccacaaatcccatttttgaaaattgtctggctgcttcaatttgatcttcaacttcaaatgttcccagtcttctgttgattgcatgcatgatcttatctccttggtaaccacttcctctgccatcaaagctagctactataatgttttctgtgcttgcaaggtaagtggcccagttgagtctgaagacagcgtctgctttttgactacacgggcctgcatacacatctaatagtagaggatatttcttggatttatcaaaatggggaggcaagatcatctgataccaaaattttgtttcattcaaaataatgaagtccagtgttttggagggcatctggacattctgcagcattttatccaaagctgaattatcttccaggactctcggccctttatcattcacactgctgtgtagagtatagaggggcagaccaggaccggaacatctcagctgataatacttcgcctctttactgaatgacacagaatagtactgacacctttccggattcagctcacaactaaggcatgtcacttttgtatagtcactaagttggattttataaagattccttcctcctggcattcctttatattcattactaatgtagtatagataatcgctggttagagcttctatcccgatgacttcccaggctccttttgtaataaatgtgcagttttttttatttatttgaaaataacaaatgtgtctgtaaccttcttcattgctaatgatcttgtagaagctattaccatcagaggtaaaatgaggttccgaaggcctaaatcttccaacccagccagtagtactcgtttcaatgtgttgccgtgccactaagcagttccatcttccactggactcatcataatcacaaatatccatgaccgaatagttctgaatcctcctgagccactgcaaagaaattctttcttgtgttgcccatgtcacatcacacaagtagtgatcccctatcaacatagaagcaggcgcagtgatttgtatggaagttgcattggtggctgagctgagagagtctgtatttacaacaaagaactttacagttggattcacagctcctgcctttggatatggaacctgtacagtctttgggtactgcagtgactcatcagagtagaaggagtattcaataagtgggacttctgtgtcgttaaattgggcatatgctaaaaaagtgccgtttggagaccaccacagagcagagtaggcactgaagacttcctcttcataaacccagtcagttattccattatatatcatatcttctttcccagtcgatgtgattctgtgacttggtaaatttggttcaattttaacataaatgtcattgttccaaacatatgccaatttatgacccactggtgaccatgtgacccactgtgtgttgtttggaatcctctcttctgtaatcagctgccttttatttaaatcataaatgtcatatgaagctgtgtaggaatgcctccattgcttcacatagttgtattctaagagaataaactgcccatcaggagatattgaataatcatttatagaatgtccaaactcatcaaatgtactgttctccaagaaaaccgagctgtttccatattcagcattgaataccaagatattattttcttgtttgtagagatattcatgatctgaaatccatcgtaaggagtacaacttcagtctataagtattttttaagtaatcagttagagtgtaagttttgcgactgtcagctgtagcatcatctgtgcctttgttcagcagaaccacgggcacggtgatgatggtgacaagcgcagcagcacccagcagtcccaggagaaccttccacgctgtcttcatcgtcggcgtctcctcggaagtgtgcgttcagtgaaggagcgcaggcagaagtcacagccagcggcggagaggcgcgtcctgctccactgctccgggcggtggagtcactcgccgctggcaagtttcggcccagagttaaacattagtgagcgcccagcccgcagggtataaaggcgccgcgggtaggctgctggacaggcggcgccggagcaggcgcgcggggcgcggggcactggcattccggccgggaggagcccg

SEQ ID NO: 28 - DNA, 4078 bp, Macaca fascicularis
  source 1..4078: mol_type = genomic DNA
ttacttctgaaaaaatgaaggcacatttattaaatgaccaggagaaattccatagtatgtagaatgggaataataatacataacattctattttatgttccattttttaaaatgagtccaaggaagttaaagtattcttttaatgaagacactcaaagaaatgaaataagaaaaattgaggcaaggactccttcaagttaagatttgcaatacaaatattttcatcttttaacagggcaagctgatgtgttcacatctcagtttcaagctgcctctttcactaggaacatcagtatgtttttttttaaagcacatttacaatgctttcccatcacccttgctgtgtttttgtagcacctatagccataactggcacctgggggcctgcattgctggcagtttcccttacatttctttggagtcttttcaactgctgtggttttacttagaagtcagtgctttgcatatttgatttcctgagactgtttgaatagtctttctcagaaaactgtgccagtctggctgtgaacagatcttctccgaggggagctgacagtagcctgctcgtgttggtatgcttggacttgggttcccagccatgccctgctatcttctctccctaatccctcttatcctgtccctgccctagtgacatcactgcccacatcttgccatccttttaaagaagagaacaacatttgaaccagtccagttagaaaaagattaaaatcctgctcagggaatctatgcaaagcttccataaaaacaattcctatttgttgtttcagcagctgatgcggaaatgattttaaacaataaaactcgaccggataattcaaacttctgtaaggtaataatctgttgtgaagacagaagtccctacttaagatgataggtatgaaatttgggaacaaaggtaaccttaagtttcttgatttgagtgtatatttttaagatcatcatcttgacagtgcagttttgagataatgaaaacaaaaatgacttttaataagctttaaatggcatggtgttttgaggtgctaaggtaaagagaaacattgttttatgaagtggctcatgtgggtgtatatgtgttggtgtgctgtgctgctagcgattccatggtcttcatcagtataccacattgcctggaaatccactccagcatcgaccagggctttggagatctgagctgactgctgaaagtgaacgttatcatctgctgttccatgaataaggaggtactcaacttgtttaaaattttcagctctgctcatgactgttgaattcctgtaatggtcaaggttgtcttctggagttgggagacccatgtaacgttctgtgtacactgaatcatagtactcccaccgggatacaggcgccacggctattccacacttgaacacgccgcttcccgatcccaggaccattgaggttacgtaccctccatatgaccagccccaaattgcaattcgtttgttgtccacaaatcccatttttgaaaattgtctggctgcttcaatttgatcttcaacttcaaatgttcccagtcttctgttgattgcatgcatgatcttatctccttggtaaccacttcctctgccatcaaagctagctactataatgttttctgtgcttgcaaggtaagtggcccagttgagtctgaagacagcgtctgctttttgactacacgggcctgcatacacatctaatagtagaggatatttcttggatttatcaaaatggggaggcaagatcatctgataccaaaattttgtttcattcaaaataatgaagtccagtgttttggagggcatctggacattctgcagcattttatccaaagctgaattatcttccaggactctcggccctttatcattcacactgctgtgtagagtatagaggggcagaccaggaccggaacatctcagctgataatacttcgcctctttactgaatgacacagaatagtactgacacctttccggattcagctcacaactaaggcatgtcacttttgtatagtcactaagttggattttataaagattccttcctcctggcattcctttatattcattactaatgtagtatagataatcgctggttagagcttctatcccgatgacttcccaggctccttttgtaataaatgtgcagttttttttatttatttgaaaataacaaatgtgtctgtaaccttcttcattgctgatgatcttgtagaagctattaccatcagaggtaaaatgaggttccgaaggcctaaatcttccaacccagccagtagtactcgtttcaatgtgttgccgtgccactaagcagttccatcttccactggactcatcataatcacaaatatccatgaccgaatagttctgaatcctcctgagccactgcaaagaaattctttcttgtgttgcccatgtcacatcacacaagtagtgatcccctatcaacatagaagcaggcgcagtgatttgtatggaagttgcattggtggctgagctgagagagtctgtatttacaacaaagaactttacagttggattcacagctcctgcctttggatatggaacctgtacagtctttgggtactgcagtgactcatcagagtagaaggagtattcaataagtgggacttctgtgtcgttaaattgggcatatgctaaaaaagtgccgtttggagaccaccacagagcagagtaggcactgaagacttcctcttcataaacccagtcagttattccattatatatcatatcttctttcccagtcgatgtgattctgtgacttggtaaatttggttcaattttgacataaatgtcattgttccaaacatatgccaatttatgacccactggtgaccatgtgacccactgtgtgttgtttggaatcctctcttctgtaatcagctgccttttatttaaatcataaatgtcatatgaagctgtgtaggaatgcctccattgcttcacatagttgtattctaagagaataaactgcccatcaggagatattgaataatcatttatagaatgtccaaactcatcaaatgtactgttctccaagaaaaccgagctgtttccatattcagcattgaataccaagatattattttcttgtttgtagagatattcatgatctgaaatccatcgtaaggagtacaacttcagtctataagtattttttaagtaatcagttagagtgtaagttttgcgactgtcagctgtagcatcatctgtgcctttgttcagcagaaccacgggcacggtgatgatggtgacaagcgcagcagcacccagcagtcccaggagaaccttccacgctgtcttcatcgtcgacgtctcctcggaagtgtgcgttcagtgaaggagcgcaggcagaagtcacagccggcggcggagaggcgcgtcctgctccactgctccgggcggtggagtcactcgccgctggcaagtttcggcccagagttaaacattagtgagcgcccagcccgcagggtataaaggcgccgcgggtaggctgctggacaggcggcgccggagcaggcgcgcggggcgcggggcacgggcattccggccggggggagcccgcgagggccccctgagggcggtgcggggcgctgggcggcagccggggcgctgggtgcgaggcccagaggagccgtgggggaggggaaagggcgcgcggcctcagatgcgcagaccctgggtcggcgacgcgaggaccctgctccctcttagctgaaaaggacgtcggcgttcagctcctccaacctcgcgtggacaggcgagggaccgaggcccagagagggcagagggctttggtaaactcacacagctcaccgctggcaactgaaactaaaacccaggcctctgtctcttgccagtgaaagttatgttaggaggcagtcaggtgtctaaagctgtatgaaaggcaaagagaaaaggtgattgttccctcatgaatggcccttggaagctgagtatctggattcaccctccccagagaatttcccgattgtcttgcaggcttacacactcatcaaaatgccaaaaataatgacaataac

SEQ ID NO: 29 - DNA, 3543 bp, Macaca fascicularis
  source 1..3543: mol_type = genomic DNA
ttacttctgaaaaaatgaaggcacatttattaaatgaccaggagaaattccatagtatgtagaatgggaataataatacataacattctattttatgttccattttttaaaatgagtccaaggaagttaaagtattcttttaatgaagacactcaaagaaatgaaataagaaaaattgaggcaaggactccttcaagttaagatttgcaatacaaatattttcatcttttaacagggcaagctgatgtgttcacatctcagtttcaagctgcctctttcactaggaacatcagtatgtttttttttaaagcacatttacaatgctttcccatcacccttgctgtgtttttgtagcacctatagccataactggcacctgggggcctgcattgctggcagtttcccttacatttctttggagtcttttcaactgctgtggttttacttagaagtcagtgctttgcatatttgatttcctgagactgtttgaatagtctttctcagaaaactgtgccagtctggctgtgaacagatcttctccgaggggagctgacagtagcctgctcgtgttggtatgcttggacttgggttcccagccatgccctgctatcttctctccctaatccctcttatcctgtccctgccctagtgacatcactgcccacatcttgccatccttttaaagaagagaacaacatttgaaccagtccagttagaaaaagattaaaatcctgctcagggaatctatgcaaagcttccataaaaacaattcctatttgttgtttcagcagctgatgcggaaatgattttaaacaataaaactcgaccggataattcaaacttctgtaaggtaataatctgttgtgaagacagaagtccctacttaagatgataggtatgaaatttgggaacaaaggtaaccttaagtttcttgatttgagtgtatatttttaagatcatcatcttgacagtgcagttttgagataatgaaaacaaaaatgacttttaataagctttaaatggcatggtgttttgaggtgctaaggtaaagagaaacattgttttatgaagtggctcatgtgggtgtatatgtgttggtgtgctgtgctgctagcgattccatggtcttcatcagtataccacattgcctggaaatccactccagcatcgaccagggctttggagatctgagctgactgctgaaagtgaacgttatcatctgctgttccatgaataaggaggtactcaacttgtttaaaattttcagctctgctcatgactgttgaattcctgtaatggtcaaggttgtcttctggagttgggagacccatgtaacgttctgtgtacactgaatcatagtactcccaccgggatacaggcgccacggctattccacacttgaacacgccgcttcccgatcccaggaccattgaggttacgtaccctccatatgaccagccccaaattgcaattcgtttgttgtccacaaatcccatttttgaaaattgtctggctgcttcaatttgatcttcaacttcaaatgttcccagtcttctgttgattgcatgcatgatcttatctccttggtaaccacttcctctgccatcaaagctagctactataatgttttctgtgcttgcaaggtaagtggcccagttgagtctgaagacagcgtctgctttttgactacacgggcctgcatacacatctaatagtagaggatatttcttggatttatcaaaatggggaggcaagatcatctgataccaaaattttgtttcattcaaaataatgaagtccagtgttttggagggcatctggacattctgcagcattttatccaaagctgaattatcttccaggactctcggccctttatcattcacactgctgtgtagagtatagaggggcagaccaggaccggaacatctcagctgataatacttcgcctctttactgaatgacacagaatagtactgacacctttccggattcagctcacaactaaggcatgtcacttttgtatagtcactaagttggattttataaagattccttcctcctggcattcctttatattcattactaatgtagtatagataatcgctggttagagcttctatcccgatgacttcccaggctccttttgtaataaatgtgcagttttttttatttatttgaaaataacaaatgtgtctgtaaccttcttcattgctgatgatcttgtagaagctattaccatcagaggtaaaatgaggttccgaaggcctaaatcttccaacccagccagtagtactcgtttcaatgtgttgccgtgccactaagcagttccatcttccactggactcatcataatcacaaatatccatgaccgaatagttctgaatcctcctgagccactgcaaagaaattctttcttgtgttgcccatgtcacatcacacaagtagtgatcccctatcaacatagaagcaggcgcagtgatttgtatggaagttgcattggtggctgagctgagagagtctgtatttacaacaaagaactttacagttggattcacagctcctgcctttggatatggaacctgtacagtctttgggtactgcagtgactcatcagagtagaaggagtattcaataagtgggacttctgtgtcgttaaattgggcatatgctaaaaaagtgccgtttggagaccaccacagagcagagtaggcactgaagacttcctcttcataaacccagtcagttattccattatatatcatatcttctttcccagtcgatgtgattctgtgacttggtaaatttggttcaattttgacataaatgtcattgttccaaacatatgccaatttatgacccactggtgaccatgtgacccactgtgtgttgtttggaatcctctcttctgtaatcagctgccttttatttaaatcataaatgtcatatgaagctgtgtaggaatgcctccattgcttcacatagttgtattctaagagaataaactgcccatcaggagatattgaataatcatttatagaatgtccaaactcatcaaatgtactgttctccaagaaaaccgagctgtttccatattcagcattgaataccaagatattattttcttgtttgtagagatattcatgatctgaaatccatcgtaaggagtacaacttcagtctataagtattttttaagtaatcagttagagtgtaagttttgcgactgtcagctgtagcatcattgcctttgttcagcagaaccacgggcacggtgatgatggtgacaagcgcagcagcacccagcagtcccaggagaaccttccacgctgtcttcatcgtcgacgtctcctcggaagtgtgcgttcagtgaaggagcgcaggcagaagtcacagccggcggcggagaggcgcgtcctgctccactgctccgggcggtggagtcactcgccgctggcaagtttcggcccagagttaaacattagtgagcgcccagcccgcagggtataaaggcgccgcgggtaggctgctggacaggcggcgc

SEQ ID NO: 30 - DNA, 3245 bp, Macaca fascicularis
  source 1..3245: mol_type = genomic DNA
ttacttctgaaaaaatgaaggcacatttattaaatgaccaggagaaattccatagtatgtagaatgggaataataatacataacattctattttatgttccattttttaaaatgagtccaaggaagttaaagtattcttttaatgaagacactcaaagaaatgaaataagaaaaattgaggcaaggactccttcaagttaagatttgcaatacaaatattttcatcttttaacagggcaagctgatgtgttcacatctcagtttcaagctgcctctttcactaggaacatcagtatgtttttttttaaagcacatttacaatgctttcccatcacccttgctgtgtttttgtagcacctatagccataactggcacctgggggcctgcattgctggcagtttcccttacatttctttggagtcttttcaactgctgtggttttacttagaagtcagtgctttgcatatttgatttcctgagactgtttgaatagtctttctcagaaaactgtgccagtctggctgtgaacagatcttctccgaggggagctgacagtagcctgctcgtgttggtatgcttggacttgggttcccagccatgccctgctatcttctctccctaatccctcttatcctgtccctgccctagtgacatcactgcccacatcttgccatccttttaaagaagagaacaacatttgaaccagtccagttagaaaaagattaaaatcctgctcagggaatctatgcaaagcttccataaaaacaattcctatttgttgtttcagcagctgatgcggaaatgattttaaacaataaaactcgaccggataattcaaacttctgtaaggtaataatctgttgtgaagacagaagtccctacttaagatgataggtatgaaatttgggaacaaaggtaaccttaagtttcttgatttgagtgtatatttttaagatcatcatcttgacagtgcagttttgagataatgaaaacaaaaatgacttttaataagctttaaatggcatggtgttttgaggtgctaaggtaaagagaaacattgttttatgaagtggctcatgtgggtgtatatgtgttggtgtgctgtgctgctagcgattccatggtcttcatcagtataccacattgcctggaaatccactccagcatcgaccagggctttggagatctgagctgactgctgaaagtgaacgttatcatctgctgttccatgaataaggaggtactcaacttgtttaaaattttcagctctgctcatgactgttgaattcctgtaatggtcaaggttgtcttctggagttgggagacccatgtaacgttctgtgtacactgaatcatagtactcccaccgggatacaggcgccacggctattccacacttgaacacgccgcttcccgatcccaggaccattgaggttacgtaccctccatatgaccagccccaaattgcaattcgtttgttgtccacaaatcccatttttgaaaattgtctggctgcttcaatttgatcttcaacttcaaatgttcccagtcttctgttgattgcatgcatgatcttatctccttggtaaccacttcctctgccatcaaagctagctactataatgttttctgtgcttgcaaggtaagtggcccagttgagtctgaagacagcgtctgctttttgactacacgggcctgcatacacatctaatagtagaggatatttcttggatttatcaaaatggggaggcaagatcatctgataccaaaattttgtttcattcaaaataatgaagtccagtgttttggagggcatctggacattctgcagcattttatccaaagctgaattatcttccaggactctcggccctttatcattcacactgctgtgtagagtatagaggggcagaccaggaccggaacatctcagctgataatacttcgcctctttactgaatgacacagaatagtactgacacctttccggattcagctcacaactaaggcatgtcacttttgtatagtcactaagttggattttataaagattccttcctcctggcattcctttatattcattactaatgtagtatagataatcgctggttagagcttctatcccgatgacttcccaggctccttttgtaataaatgtgcagttttttttatttatttgaaaataacaaatgtgtctgtaaccttcttcattgctgatgatcttgtagaagctattaccatcagaggtaaaatgaggttccgaaggcctaaatcttccaacccagccagtagtactcgtttcaatgtgttgccgtgccactaagcagttccatcttccactggactcatcataatcacaaatatccatgaccgaatagttctgaatcctcctgagccactgcaaagaaattctttcttgtgttgcccatgtcacatcacacaagtagtgatcccctatcaacatagaagcaggcgcagtgatttgtatggaagttgcattggtggctgagctgagagagtctgtatttacaacaaagaactttacagttggattcacagctcctgcctttggatatggaacctgtacagtctttgggtactgcagtgactcatcagagtagaaggagtattcaataagtgggacttctgtgtcgttaaattgggcatatgctaaaaaagtgccgtttggagaccaccacagagcagagtaggcactgaagacttcctcttcataaacccagtcagttattccattatatatcatatcttctttcccagtcgatgtgattctgtgacttggtaaatttggttcaattttgacataaatgtcattgttccaaacatatgccaatttatgacccactggtgaccatgtgacccactgtgtgttgtttggaatcctctcttctgtaatcagctgccttttatttaaatcataaatgtcatatgaagctgtgtaggaatgcctccattgcttcacatagttgtattctaagagaataaactgcccatcaggagatattgaataatcatttatagaatgtccaaactcatcatttaaaaatatgggcagaggaagaggaatcatcaaaggagactaaaaagtagtcaaggcagggagcatttcaagaaggagagaaagatccactttgccatatgctgtagaaatagtccaacaggttgagaaatgacagtactcgtgatttcaaaggtaatgaaaaaaatccccagaattctatgcgtg

SEQ ID NO: 31 - protein, 16 aa, unidentified
  REGION 1..16: note = source = /note="Description of Unknown: RFGF peptide sequence"
AAVALLPAVLLALLAP

SEQ ID NO: 32 - protein, 11 aa, unidentified
  REGION 1..11: note = source = /note="Description of Unknown: RFGF analogue sequence"
AALLPVLLAAP

SEQ ID NO: 33 - protein, 13 aa, Human immunodeficiency virus
GRKKRRQRRRPPQ

SEQ ID NO: 34 - protein, 16 aa, Drosophila sp.
RQIKIWFQNRRMKWKK

SEQ ID NO: 35 - DNA, 21 bp, synthetic construct
  source 1..21: mol_type = other DNA
  modified_base 1: mod_base = OTHER; note = 2'-O-methylcytidine-3'-phosphate
  modified_base 2: mod_base = OTHER; note = 2'-O-methyluridine-3'-phosphate
  modified_base 3: mod_base = OTHER; note = 2'-O-methyluridine-3'-phosphate
  modified_base 4: mod_base = OTHER; note = adenosine-3'-phosphate
  modified_base 5: mod_base = OTHER; note = 2'-O-methylcytidine-3'-phosphate
  modified_base 6: mod_base = OTHER; note = guanosine-3'-phosphate
  modified_base 7: mod_base = OTHER; note = 2'-O-methylcytidine-3'-phosphate
  modified_base 8: mod_base = OTHER; note = 2'-O-methyluridine-3'-phosphate
  modified_base 9: mod_base = OTHER; note = guanosine-3'-phosphate
  modified_base 10: mod_base = OTHER; note = adenosine-3'-phosphate
  modified_base 11: mod_base = OTHER; note = guanosine-3'-phosphate
  modified_base 12: mod_base = OTHER; note = 2'-O-methyluridine-3'-phosphate
  modified_base 13: mod_base = OTHER; note = adenosine-3'-phosphate
  modified_base 14: mod_base = OTHER; note = 2'-O-methylcytidine-3'-phosphate
  modified_base 15: mod_base = OTHER; note = 2'-O-methyluridine-3'-phosphate
  modified_base 16: mod_base = OTHER; note = 2'-O-methyluridine-3'-phosphate
  modified_base 17: mod_base = OTHER; note = 2'-O-methylcytidine-3'-phosphate
  modified_base 18: mod_base = OTHER; note = guanosine-3'-phosphate
  modified_base 19: mod_base = OTHER; note = adenosine-3'-phosphate
  modified_base 20: mod_base = OTHER; note = 2'-deoxythymidine-3'-phosphorothioate
  misc_feature 1..19: note = RNA
  misc_feature 20..21: note = DNA
cttacgctgagtacttcgatt

SEQ ID NO: 36 - DNA, 21 bp, synthetic construct
  source 1..21: mol_type = other DNA
  modified_base 1: mod_base = OTHER; note = uridine-3'-phosphate
  modified_base 2: mod_base = OTHER; note = cytidine-3'-phosphate
  modified_base 3: mod_base = OTHER; note = guanosine-3'-phosphate
  modified_base 4: mod_base = OTHER; note = adenosine-3'-phosphate
  modified_base 5: mod_base = OTHER; note = adenosine-3'-phosphate
  modified_base 6: mod_base = OTHER; note = guanosine-3'-phosphate
  modified_base 7: mod_base = OTHER; note = 2'-O-methyluridine-3'-phosphate
  modified_base 8: mod_base = OTHER; note = adenosine-3'-phosphate
  modified_base 9: mod_base = OTHER; note = cytidine-3'-phosphate
  modified_base 10: mod_base = OTHER; note = uridine-3'-phosphate
  modified_base 11: mod_base = OTHER; note = 2'-O-methylcytidine-3'-phosphate
  modified_base 12: mod_base = OTHER; note = adenosine-3'-phosphate
  modified_base 13: mod_base = OTHER; note = guanosine-3'-phosphate
  modified_base 14: mod_base = OTHER; note = cytidine-3'-phosphate
  modified_base 15: mod_base = OTHER; note = guanosine-3'-phosphate
  modified_base 16: mod_base = OTHER; note = 2'-O-methyluridine-3'-phosphate
  modified_base 17: mod_base = OTHER; note = adenosine-3'-phosphate
  modified_base 18: mod_base = OTHER; note = adenosine-3'-phosphate
  modified_base 19: mod_base = OTHER; note = guanosine-3'-phosphate
  modified_base 20: mod_base = OTHER; note = 2'-deoxythymidine-3'-phosphorothioate
  misc_feature 1..19: note = RNA
  misc_feature 20..21: note = DNA
tcgaagtactcagcgtaagtt

SEQ ID NO: 37 - RNA, 21 nt, synthetic construct
  source 1..21: mol_type = other RNA
gcgctcactaatgtttaactc

SEQ ID NO: 38 - RNA, 21 nt, synthetic construct
  source 1..21: mol_type = other RNA
cttgccagcggcgagtgactc

SEQ ID NO: 39 - RNA, 21 nt, synthetic construct
  source 1..21: mol_type = other RNA
ttctgcctgcgctccttctct

SEQ ID NO: 40 - RNA, 21 nt, synthetic construct
  source 1..21: mol_type = other RNA
gcgctccttctctgaacgctc

SEQ ID NO: 41 - RNA, 21 nt, synthetic construct
  source 1..21: mol_type = other RNA
cttctctgaacgctcacttcc

SEQ ID NO: 42 - RNA, 21 nt, synthetic construct
  source 1..21: mol_type = other RNA
acgctcacttccgaggagacg

SEQ ID NO: 43 - RNA, 21 nt, synthetic construct
  source 1..21: mol_type = other RNA
tccgaggagacgccgacgatg

SEQ ID NO: 44 - RNA, 21 nt, synthetic construct
  source 1..21: mol_type = other RNA
gccgacgatgaagacaccgtg

SEQ ID NO: 45 - RNA, 21 nt, synthetic construct
  source 1..21: mol_type = other RNA
atgaagacaccgtggaaggtt

SEQ ID NO: 46 - RNA, 21 nt, synthetic construct
  source 1..21: mol_type = other RNA
acaccgtggaaggttcttctg

SEQ ID NO: 47 - RNA, 21 nt, synthetic construct
  source 1..21: mol_type = other RNA
tggaaggttcttctgggactg

SEQ ID NO: 48 - RNA, 21 nt, synthetic construct
  source 1..21: mol_type = other RNA
tgctgctgcgcttgtcaccat

SEQ ID NO: 49 - RNA, 21 nt, synthetic construct
  source 1..21: mol_type = other RNA
tgcgcttgtcaccatcatcac

SEQ ID NO: 50 - RNA, 21 nt, synthetic construct
  source 1..21: mol_type = other RNA
cgtgcccgtggttctgctgaa

SEQ ID NO: 51 - RNA, 21 nt, synthetic construct
  source 1..21: mol_type = other RNA
cgtggttctgctgaacaaagg

SEQ ID NO: 52 - RNA, 21 nt, synthetic construct
  source 1..21: mol_type = other RNA
tgctgaacaaaggcacagatg

SEQ ID NO: 53 - RNA, 21 nt, synthetic construct
  source 1..21: mol_type = other RNA
acaaaggcacagatgatgcta

SEQ ID NO: 54 - RNA, 21 nt, synthetic construct
  source 1..21: mol_type = other RNA
gcacagatgatgctacagctg

SEQ ID NO: 55 - RNA, 21 nt, synthetic construct
  source 1..21: mol_type = other RNA
gatgctacagctgacagtcgc

SEQ ID NO: 56 - RNA, 21 nt, synthetic construct
  source 1..21: mol_type = other RNA
cagctgacagtcgcaaaactt

SEQ ID NO: 57 - RNA, 21 nt, synthetic construct
  source 1..21: mol_type = other RNA
acagtcgcaaaacttacactc

SEQ ID NO: 58 - RNA, 21 nt, synthetic construct
  source 1..21: mol_type = other RNA
aacttacactctaactgatta

SEQ ID NO: 59 - RNA, 21 nt, synthetic construct
  source 1..21: mol_type = other RNA
cactctaactgattacttaaa

SEQ ID NO: 60 - RNA, 21 nt, synthetic construct
  source 1..21: mol_type = other RNA
ttatagactgaagttatactc

SEQ ID NO: 61 - RNA, 21 nt, synthetic construct
  source 1..21: mol_type = other RNA
gaagttatactccttaagatg

SEQ ID NO: 62 - RNA, 21 nt, synthetic construct
  source 1..21: mol_type = other RNA
ctccttaagatggatttcaga

SEQ ID NO: 63 - RNA, 21 nt, synthetic construct
  source 1..21: mol_type = other RNA
agatggatttcagatcatgaa

SEQ ID NO: 64 - RNA, 21 nt, synthetic construct
  source 1..21: mol_type = other RNA
atttcagatcatgaatatctc

SEQ ID NO: 65 - RNA, 21 nt, synthetic construct
  source 1..21: mol_type = other RNA
atcatgaatatctctacaaac

SEQ ID NO: 66 - RNA, 21 nt, synthetic construct
  source 1..21: mol_type = other RNA
atatctctacaaacaagaaaa

SEQ ID NO: 67 - RNA, 21 nt, synthetic construct
  source 1..21: mol_type = other RNA
atcttggtattcaatgctgaa

SEQ ID NO: 68 - RNA, 21 nt, synthetic construct
  source 1..21: mol_type = other RNA
gtattcaatgctgaatatgga

SEQ ID NO: 69 - RNA, 21 nt, synthetic construct
  source 1..21: mol_type = other RNA
aatgctgaatatggaaacagc

SEQ ID NO: 70 - RNA, 21 nt, synthetic construct
  source 1..21: mol_type = other RNA
aatatggaaacagctcagttt

SEQ ID NO: 71 - RNA, 21 nt, synthetic construct
  source 1..21: mol_type = other RNA
gaaacagctcagttttcttgg

SEQ ID NO: 72 - RNA, 21 nt, synthetic construct
  source 1..21: mol_type = other RNA
agttttcttggagaacagtac

SEQ ID NO: 73 - RNA, 21 nt, synthetic construct
  source 1..21: mol_type = other RNA
ggagaacagtacatttgatga

SEQ ID NO: 74 - RNA, 21 nt, synthetic construct
  source 1..21: mol_type = other RNA
cagtacatttgatgagtttgg

SEQ ID NO: 75 - RNA, 21 nt, synthetic construct
  source 1..21: mol_type = other RNA
ttgatgagtttggacattcta

SEQ ID NO: 76 - RNA, 21 nt, synthetic construct
  source 1..21: mol_type = other RNA
agtttggacattctatcaatg

SEQ ID NO: 77 - RNA, 21 nt, synthetic construct
  source 1..21: mol_type = other RNA
gacattctatcaatgattatt

SEQ ID NO: 78 - RNA, 21 nt, synthetic construct
  source 1..21: mol_type = other RNA
atgattattcaatatctcctg

SEQ ID NO: 79 - RNA, 21 nt, synthetic construct
  source 1..21: mol_type = other RNA
cctgatgggcagtttattctc

SEQ ID NO: 80 - RNA, 21 nt, synthetic construct
  source 1..21: mol_type = other RNA
gcagtttattctcttagaata

SEQ ID NO: 81 - RNA, 21 nt, synthetic construct
  source 1..21: mol_type = other RNA
ctcttagaatacaactacgtg

SEQ ID NO: 82 - RNA, 21 nt, synthetic construct
  source 1..21: mol_type = other RNA
atacaactacgtgaagcaatg

SEQ ID NO: 83 - RNA, 21 nt, synthetic construct
  source 1..21: mol_type = other RNA
cgtgaagcaatggaggcattc

SEQ ID NO: 84 - RNA, 21 nt, synthetic construct
  source 1..21: mol_type = other RNA
gaggcattcctacacagcttc

SEQ ID NO: 85 - RNA, 21 nt, synthetic construct
  source 1..21: mol_type = other RNA
ttcctacacagcttcatatga

SEQ ID NO: 86 - RNA, 21 nt, synthetic construct
  source 1..21: mol_type = other RNA
cacagcttcatatgacattta

SEQ ID NO: 87 - RNA, 21 nt, synthetic construct
  source 1..21: mol_type = other RNA
ttcatatgacatttatgattt

SEQ ID NO: 88 - RNA, 21 nt, synthetic construct
  source 1..21: mol_type = other RNA
tgatttaaataaaaggcagct

SEQ ID NO: 89 - RNA, 21 nt, synthetic construct
  source 1..21: mol_type = other RNA
aaataaaaggcagctgattac

SEQ ID NO: 90 - RNA, 21 nt, synthetic construct
  source 1..21: mol_type = other RNA
aggcagctgattacagaagag

SEQ ID NO: 91 - RNA, 21 nt, synthetic construct
  source 1..21: mol_type = other RNA
tgattacagaagagaggattc

SEQ ID NO: 92 - RNA, 21 nt, synthetic construct
  source 1..21: mol_type = other RNA
aagagaggattccaaacaaca

SEQ ID NO: 93 - RNA, 21 nt, synthetic construct
  source 1..21: mol_type = other RNA
gattccaaacaacacacagtg

SEQ ID NO: 94 - RNA, 21 nt, synthetic construct
  source 1..21: mol_type = other RNA
caacacacagtgggtcacatg

SEQ ID NO: 95 - RNA, 21 nt, synthetic construct
  source 1..21: mol_type = other RNA
tgggtcacatggtcaccagtg

SEQ ID NO: 96 - RNA, 21 nt, synthetic construct
  source 1..21: mol_type = other RNA
atggtcaccagtgggtcataa

SEQ ID NO: 97 - RNA, 21 nt, synthetic construct
  source 1..21: mol_type = other RNA
agtgggtcataaattggcata

SEQ ID NO: 98 - RNA, 21 nt, synthetic construct
  source 1..21: mol_type = other RNA
cataaattggcatatgtttgg

SEQ ID NO: 99 - RNA, 21 nt, synthetic construct
  source 1..21: mol_type = other RNA
ggcatatgtttggaacaatga

SEQ ID NO: 100 - RNA, 21 nt, synthetic construct
  source 1..21: mol_type = other RNA
tggaacaatgacatttatgtt

SEQ ID NO: 101 - RNA, 21 nt, synthetic construct
  source 1..21: mol_type = other RNA
ttgaaccaaatttaccaagtt

SEQ ID NO: 102 - RNA, 21 nt, synthetic construct
  source 1..21: mol_type = other RNA
caaatttaccaagttacagaa

SEQ ID NO: 103 - RNA, 21 nt, synthetic construct
  source 1..21: mol_type = other RNA
accaagttacagaatcacatg

SEQ ID NO: 104 - RNA, 21 nt, synthetic construct
  source 1..21: mol_type = other RNA
ttacagaatcacatggacggg

SEQ ID NO: 105 - RNA, 21 nt, synthetic construct
  source 1..21: mol_type = other RNA
tataatggaataactgactgg

SEQ ID NO: 106 - RNA, 21 nt, synthetic construct
  source 1..21: mol_type = other RNA
gaataactgactgggtttatg

SEQ ID NO: 107 - RNA, 21 nt, synthetic construct
  source 1..21: mol_type = other RNA
gactgggtttatgaagaggaa

SEQ ID NO: 108 - RNA, 21 nt, synthetic construct
  source 1..21: mol_type = other RNA
gtttatgaagaggaagtcttc

SEQ ID NO: 109 - RNA, 21 nt, synthetic construct
  source 1..21: mol_type = other RNA
gaagaggaagtcttcagtgcc

SEQ ID NO: 110 - RNA, 21 nt, synthetic construct
  source 1..21: mol_type = other RNA
aagtcttcagtgcctactctg

SEQ ID NO: 111 - RNA, 21 nt, synthetic construct
  source 1..21: mol_type = other RNA
tgcctactctgctctgtggtg

SEQ ID NO: 112 - RNA, 21 nt, synthetic construct
  source 1..21: mol_type = other RNA
tctgtggtggtctccaaacgg

SEQ ID NO: 113 - RNA, 21 nt, synthetic construct
  source 1..21: mol_type = other RNA
ggtctccaaacggcacttttt

SEQ ID NO: 114 - RNA, 21 nt, synthetic construct
  source 1..21: mol_type = other RNA
tagcatatgcccaatttaacg

SEQ ID NO: 115 - RNA, 21 nt, synthetic construct
  source 1..21: mol_type = other RNA
tgcccaatttaacgacacaga

SEQ ID NO: 116 - RNA, 21 nt, synthetic construct
  source 1..21: mol_type = other RNA
tttaacgacacagaagtccca

SEQ ID NO: 117 - RNA, 21 nt, synthetic construct
  source 1..21: mol_type = other RNA
acagaagtcccacttattgaa

SEQ ID NO: 118 - RNA, 21 nt, synthetic construct
  source 1..21: mol_type = other RNA
gtcccacttattgaatactcc

SEQ ID NO: 119 - RNA, 21 nt, synthetic construct
  source 1..21: mol_type = other RNA
tattgaatactccttctactc

SEQ ID NO: 120 - RNA, 21 nt, synthetic construct
  source 1..21: mol_type = other RNA
ctccttctactctgatgagtc

SEQ ID NO: 121 - RNA, 21 nt, synthetic construct
  source 1..21: mol_type = other RNA
ctgatgagtcactgcagtacc

SEQ ID NO: 122 - RNA, 21 nt, synthetic construct
  source 1..21: mol_type = other RNA
tcactgcagtacccaaagact

SEQ ID NO: 123 - RNA, 21 nt, synthetic construct
  source 1..21: mol_type = other RNA
agtacccaaagactgtacggg

SEQ ID NO: 124 - RNA, 21 nt, synthetic construct
  source 1..21: mol_type = other RNA
agactgtacgggttccatatc

SEQ ID NO: 125 - RNA, 21 nt, synthetic construct
  source 1..21: mol_type = other RNA
gggttccatatccaaaggcag

SEQ ID NO: 126 - RNA, 21 nt, synthetic construct
  source 1..21: mol_type = other RNA
ggagctgtgaatccaactgta

SEQ ID NO: 127 - RNA, 21 nt, synthetic construct
  source 1..21: mol_type = other RNA
gtgaatccaactgtaaagttc

SEQ ID NO: 128 - RNA, 21 nt, synthetic construct
  source 1..21: mol_type = other RNA
caactgtaaagttctttgttg

SEQ ID NO: 129 - RNA, 21 nt, synthetic construct
  source 1..21: mol_type = other RNA
ttctttgttgtaaatacagac

SEQ ID NO: 130 - RNA, 21 nt, synthetic construct
  source 1..21: mol_type = other RNA
gttgtaaatacagactctctc

SEQ ID NO: 131 - RNA, 21 nt, synthetic construct
  source 1..21: mol_type = other RNA
agactctctcagctcagtcac

SEQ ID NO: 132 - RNA, 21 nt, synthetic construct
  source 1..21: mol_type = other RNA
tctcagctcagtcaccaatgc

SEQ ID NO: 133 - RNA, 21 nt, synthetic construct
  source 1..21: mol_type = other RNA
tcagtcaccaatgcaacttcc

SEQ ID NO: 134 - RNA, 21 nt, synthetic construct
  source 1..21: mol_type = other RNA
ccaatgcaacttccatacaaa

SEQ ID NO: 135 - RNA, 21 nt, synthetic construct
  source 1..21: mol_type = other RNA
caacttccatacaaatcactg

SEQ ID NO: 136 - RNA, 21 nt, synthetic construct
  source 1..21: mol_type = other RNA
ccatacaaatcactgctcctg

SEQ ID NO: 137 - RNA, 21 nt, synthetic construct
  source 1..21: mol_type = other RNA
atcactgctcctgcttctatg

SEQ ID NO: 138 - RNA, 21 nt, synthetic construct
  source 1..21: mol_type = other RNA
tcctgcttctatgttgatagg

SEQ ID NO: 139 - RNA, 21 nt, synthetic construct
  source 1..21: mol_type = other RNA
gatcactacttgtgtgatgtg

SEQ ID NO: 140 - RNA, 21 nt, synthetic construct
  source 1..21: mol_type = other RNA
tacttgtgtgatgtgacatgg

SEQ ID NO: 141 - RNA, 21 nt, synthetic construct
  source 1..21: mol_type = other RNA
tgacatgggcaacacaagaaa

SEQ ID NO: 142 - RNA, 21 nt, synthetic construct
  source 1..21: mol_type = other RNA
gggcaacacaagaaagaattt

SEQ ID NO: 143 - RNA, 21 nt, synthetic construct
  source 1..21: mol_type = other RNA
cacaagaaagaatttctttgc

SEQ ID NO: 144 - RNA, 21 nt, synthetic construct
  source 1..21: mol_type = other RNA
aaagaatttctttgcagtggc

SEQ ID NO: 145 - RNA, 21 nt, synthetic construct
  source 1..21: mol_type = other RNA
gtggctcaggaggattcagaa

SEQ ID NO: 146 - RNA, 21 nt, synthetic construct
  source 1..21: mol_type = other RNA
caggaggattcagaactattc

SEQ ID NO: 147 - RNA, 21 nt, synthetic construct
  source 1..21: mol_type = other RNA
gattcagaactattcggtcat

SEQ ID NO: 148 - RNA, 21 nt, synthetic construct
  source 1..21: mol_type = other RNA
ctattcggtcatggatatttg

SEQ ID NO: 149 - RNA, 21 nt, synthetic construct
  source 1..21: mol_type = other RNA
ggtcatggatatttgtgacta

SEQ ID NO: 150 - RNA, 21 nt, synthetic construct
  source 1..21: mol_type = other RNA
ggatatttgtgactatgatga

SEQ ID NO: 151 - RNA, 21 nt, synthetic construct
  source 1..21: mol_type = other RNA
tgtgactatgatgaatccagt

SEQ ID NO: 152 - RNA, 21 nt, synthetic construct
  source 1..21: mol_type = other RNA
gatgaatccagtggaagatgg

SEQ ID NO: 153 - RNA, 21 nt, synthetic construct
  source 1..21: mol_type = other RNA
cagtggaagatggaactgctt

SEQ ID NO: 154 - RNA, 21 nt, synthetic construct
  source 1..21: mol_type = other RNA
aagatggaactgcttagtggc

SEQ ID NO: 155 - RNA, 21 nt, synthetic construct
  source 1..21: mol_type = other RNA
actgcttagtggcacggcaac

SEQ ID NO: 156 - RNA, 21 nt, synthetic construct
  source 1..21: mol_type = other RNA
tagtggcacggcaacacattg

SEQ ID NO: 157 - RNA, 21 nt, synthetic construct
  source 1..21: mol_type = other RNA
ggcaacacattgaaatgagta

SEQ ID NO: 158 - RNA, 21 nt, synthetic construct
  source 1..21: mol_type = other RNA
acattgaaatgagtactactg

SEQ ID NO: 159 - RNA, 21 nt, synthetic construct
  source 1..21: mol_type = other RNA
gagtactactggctgggttgg

SEQ ID NO: 160 - RNA, 21 nt, synthetic construct
  source 1..21: mol_type = other RNA
tggctgggttggaagatttag

SEQ ID NO: 161 - RNA, 21 nt, synthetic construct
  source 1..21: mol_type = other RNA
ggttggaagatttaggccttc

SEQ ID NO: 162 - RNA, 21 nt, synthetic construct
  source 1..21: mol_type = other RNA
gatttaggccttcagaacctc

SEQ ID NO: 163 - RNA, 21 nt, synthetic construct
  source 1..21: mol_type = other RNA
ccttcagaacctcattttacc

SEQ ID NO: 164 - RNA, 21 nt, synthetic construct
  source 1..21: mol_type = other RNA
gaacctcattttacccttgat

SEQ ID NO: 165 - RNA, 21 nt, synthetic construct
  source 1..21: mol_type = other RNA
cattttacccttgatggtaat

SEQ ID NO: 166 - RNA, 21 nt, synthetic construct
  source 1..21: mol_type = other RNA
acccttgatggtaatagcttc

SEQ ID NO: 167 - RNA, 21 nt, synthetic construct
  source 1..21: mol_type = other RNA
atggtaatagcttctacaaga

SEQ ID NO: 168 - RNA, 21 nt, synthetic construct
  source 1..21: mol_type = other RNA
tagcttctacaagatcatcag

SEQ ID NO: 169 - RNA, 21 nt, synthetic construct
  source 1..21: mol_type = other RNA
caagatcatcagcaatgaaga

SEQ ID NO: 170 - RNA, 21 nt, synthetic construct
  source 1..21: mol_type = other RNA
agcaatgaagaaggttacaga

SEQ ID NO: 171 - RNA, 21 nt, synthetic construct
  source 1..21: mol_type = other RNA
gaaggttacagacacatttgc

SEQ ID NO: 172 - RNA, 21 nt, synthetic construct
  source 1..21: mol_type = other RNA
acagacacatttgctatttcc

SEQ ID NO: 173 - RNA, 21 nt, synthetic construct
  source 1..21: mol_type = other RNA
catttgctatttccaaataga

SEQ ID NO: 174 - RNA, 21 nt, synthetic construct
  source 1..21: mol_type = other RNA
gactgcacatttattacaaaa

SEQ ID NO: 175 - RNA, 21 nt, synthetic construct
  source 1..21: mol_type = other RNA
acatttattacaaaaggcacc

SEQ ID NO: 176 - RNA, 21 nt, synthetic construct
  source 1..21: mol_type = other RNA
ttacaaaaggcacctgggaag

SEQ ID NO: 177 - RNA, 21 nt, synthetic construct
  source 1..21: mol_type = other RNA
ggcacctgggaagtcatcggg

SEQ ID NO: 178 - RNA, 21 nt, synthetic construct
  source 1..21: mol_type = other RNA
tgggaagtcatcgggatagaa

SEQ ID NO: 179 - RNA, 21 nt, synthetic construct
  source 1..21: mol_type = other RNA
gtcatcgggatagaagctcta

SEQ ID NO: 180 - RNA, 21 nt, synthetic construct
  source 1..21: mol_type = other RNA
ggatagaagctctaaccagtg

SEQ ID NO: 181 - RNA, 21 nt, synthetic construct
  source 1..21: mol_type = other RNA
gctctaaccagtgattatcta

SEQ ID NO: 182 - RNA, 21 nt, synthetic construct
  source 1..21: mol_type = other RNA
accagtgattatctatactac

SEQ ID NO: 183 - RNA, 21 nt, synthetic construct
  source 1..21: mol_type = other RNA
gattatctatactacattagt

SEQ ID NO: 184 - RNA, 21 nt, synthetic construct
  source 1..21: mol_type = other RNA
taatgaatataaaggaatgcc

SEQ ID NO: 185 - RNA, 21 nt, synthetic construct
  source 1..21: mol_type = other RNA
atataaaggaatgccaggagg

SEQ ID NO: 186 - RNA, 21 nt, synthetic construct
  source 1..21: mol_type = other RNA
caggaggaaggaatctttata

SEQ ID NO: 187 - RNA, 21 nt, synthetic construct
  source 1..21: mol_type = other RNA
gaaggaatctttataaaatcc

SEQ ID NO: 188 - RNA, 21 nt, synthetic construct
  source 1..21: mol_type = other RNA
ttataaaatccaacttagtga

SEQ ID NO: 189 - RNA, 21 nt, synthetic construct
  source 1..21: mol_type = other RNA
caacttagtgactatacaaaa

SEQ ID NO: 190 - RNA, 21 nt, synthetic construct
  source 1..21: mol_type = other RNA
tgactatacaaaagtgacatg

SEQ ID NO: 191 - RNA, 21 nt, synthetic construct
  source 1..21: mol_type = other RNA
aaaagtgacatgcctcagttg

SEQ ID NO: 192 - RNA, 21 nt, synthetic construct
  source 1..21: mol_type = other RNA
cctcagttgtgagctgaatcc

SEQ ID NO: 193 - RNA, 21 nt, synthetic construct
  source 1..21: mol_type = other RNA
gagctgaatccggaaaggtgt

SEQ ID NO: 194 - RNA, 21 nt, synthetic construct
  source 1..21: mol_type = other RNA
ccggaaaggtgtcagtactat

SEQ ID NO: 195 - RNA, 21 nt, synthetic construct
  source 1..21: mol_type = other RNA
aggtgtcagtactattctgtg

SEQ ID NO: 196 - RNA, 21 nt, synthetic construct
  source 1..21: mol_type = other RNA
cagtactattctgtgtcattc

SEQ ID NO: 197 - RNA, 21 nt, synthetic construct
  source 1..21: mol_type = other RNA
ctgtgtcattcagtaaagagg

SEQ ID NO: 198 - RNA, 21 nt, synthetic construct
  source 1..21: mol_type = other RNA
tcagtaaagaggcgaagtatt

SEQ ID NO: 199 - RNA, 21 nt, synthetic construct
  source 1..21: mol_type = other RNA
gaggcgaagtattatcagctg

SEQ ID NO: 200 - RNA, 21 nt, synthetic construct
  source 1..21: mol_type = other RNA
gtattatcagctgagatgttc

SEQ ID NO: 201 - RNA, 21 nt, synthetic construct
  source 1..21: mol_type = other RNA
ctctatactctacacagcagc

SEQ ID NO: 202 - RNA, 21 nt, synthetic construct
  source 1..21: mol_type = other RNA
ctctacacagcagcgtgaatg

SEQ ID NO: 203 - RNA, 21 nt, synthetic construct
  source 1..21: mol_type = other RNA
agcagcgtgaatgataaaggg

SEQ ID NO: 204 - RNA, 21 nt, synthetic construct
  source 1..21: mol_type = other RNA
aatgataaagggctgagagtc

SEQ ID NO: 205 - RNA, 21 nt, synthetic construct
  source 1..21: mol_type = other RNA
gggctgagagtcctggaagac

SEQ ID NO: 206 - RNA, 21 nt, synthetic construct
  source 1..21: mol_type = other RNA
agtcctggaagacaattcagc

SEQ ID NO: 207 - RNA, 21 nt, synthetic construct
  source 1..21: mol_type = other RNA
aagacaattcagctttggata

SEQ ID NO: 208 - RNA, 21 nt, synthetic construct
  source 1..21: mol_type = other RNA
tcagctttggataaaatgctg

SEQ ID NO: 209 - RNA, 21 nt, synthetic construct
  source 1..21: mol_type = other RNA
gataaaatgctgcagaatgtc

SEQ ID NO: 210 - RNA, 21 nt, synthetic construct
  source 1..21: mol_type = other RNA
atgctgcagaatgtccagatg

SEQ ID NO: 211 - RNA, 21 nt, synthetic construct
  source 1..21: mol_type = other RNA
ctggacttcattattttgaat

SEQ ID NO: 212 - RNA, 21 nt, synthetic construct
  source 1..21: mol_type = other RNA
aaacaaaattttggtatcaga

SEQ ID NO: 213 - RNA, 21 nt, synthetic construct
  source 1..21: mol_type = other RNA
ttggtatcagatgatcttgcc

SEQ ID NO: 214 - RNA, 21 nt, synthetic construct
  source 1..21: mol_type = other RNA
cagatgatcttgcctcctcat

SEQ ID NO: 215 - RNA, 21 nt, synthetic construct
  source 1..21: mol_type = other RNA
atcttgcctcctcattttgat

SEQ ID NO: 216 - RNA, 21 nt, synthetic construct
  source 1..21: mol_type = other RNA
cctcctcattttgataaatcc

SEQ ID NO: 217 - RNA, 21 nt, synthetic construct
  source 1..21: mol_type = other RNA
cattttgataaatccaagaaa

SEQ ID NO: 218 - RNA, 21 nt, synthetic construct
  source 1..21: mol_type = other RNA
aaatccaagaaatatcctcta

SEQ ID NO: 219 - RNA, 21 nt, synthetic construct
  source 1..21: mol_type = other RNA
aagaaatatcctctactatta

SEQ ID NO: 220 - RNA, 21 nt, synthetic construct
  source 1..21: mol_type = other RNA
ctctactattagatgtgtatg

SEQ ID NO: 221 - RNA, 21 nt, synthetic construct
  source 1..21: mol_type = other RNA
agacactgtcttcagactgaa

SEQ ID NO: 222 - RNA, 21 nt, synthetic construct
  source 1..21: mol_type = other RNA
tgtcttcagactgaactgggc

SEQ ID NO: 223 - RNA, 21 nt, synthetic construct
  source 1..21: mol_type = other RNA
agactgaactgggccacttac

SEQ ID NO: 224 - RNA, 21 nt, synthetic construct
  source 1..21: mol_type = other RNA
ccacttaccttgcaagcacag

SEQ ID NO: 225 - RNA, 21 nt, synthetic construct
  source 1..21: mol_type = other RNA
ttgcaagcacagaaaacatta

SEQ ID NO: 226 - RNA, 21 nt, synthetic construct
  source 1..21: mol_type = other RNA
cacagaaaacattatagtagc

SEQ ID NO: 227 - RNA, 21 nt, synthetic construct
  source 1..21: mol_type = other RNA
acattatagtagctagctttg

SEQ ID NO: 228 - RNA, 21 nt, synthetic construct
  source 1..21: mol_type = other RNA
gtagctagctttgatggcaga

SEQ ID NO: 229 - RNA, 21 nt, synthetic construct
  source 1..21: mol_type = other RNA
gctttgatggcagaggaagtg

SEQ ID NO: 230 - RNA, 21 nt, synthetic construct
  source 1..21: mol_type = other RNA
gcagaggaagtggttaccaag

SEQ ID NO: 231 - RNA, 21 nt, synthetic construct
  source 1..21: mol_type = other RNA
ggttaccaaggagataagatc

SEQ ID NO: 232 - RNA, 21 nt, synthetic construct
  source 1..21: mol_type = other RNA
aaggagataagatcatgcatg

SEQ ID NO: 233 - RNA, 21 nt, synthetic construct
  source 1..21: mol_type = other RNA
aagatcatgcatgcaatcaac

SEQ ID NO: 234 - RNA, 21 nt, synthetic construct
  source 1..21: mol_type = other RNA
catgcaatcaacagaagactg

SEQ ID NO: 235 - RNA, 21 nt, synthetic construct
  source 1..21: mol_type = other RNA
acagaagactgggaacatttg

SEQ ID NO: 236 - RNA, 21 nt, synthetic construct
  source 1..21: mol_type = other RNA
actgggaacatttgaagttga

SEQ ID NO: 237 - RNA, 21 nt, synthetic construct
  source 1..21: mol_type = other RNA
aacatttgaagttgaagatca

SEQ ID NO: 238 - RNA, 21 nt, synthetic construct
  source 1..21: mol_type = other RNA
tgaagttgaagatcaaattga

SEQ ID NO: 239 - RNA, 21 nt, synthetic construct
  source 1..21: mol_type = other RNA
tgaagatcaaattgaagcagc

SEQ ID NO: 240 - RNA, 21 nt, synthetic construct
  source 1..21: mol_type = other RNA
aaattgaagcagccagacaat

SEQ ID NO: 241 - RNA, 21 nt, synthetic construct
  source 1..21: mol_type = other RNA
gcagccagacaattttcaaaa

SEQ ID NO: 242 - RNA, 21 nt, synthetic construct
  source 1..21: mol_type = other RNA
gggatttgtggacaacaaacg

SEQ ID NO: 243 - RNA, 21 nt, synthetic construct
  source 1..21: mol_type = other RNA
tgtggacaacaaacgaattgc

SEQ ID NO: 244 - RNA, 21 nt, synthetic construct
  source 1..21: mol_type = other RNA
aacaaacgaattgcaatttgg

SEQ ID NO: 245 - RNA, 21 nt, synthetic construct
  source 1..21: mol_type = other RNA
ggtcatatggagggtacgtaa

SEQ ID NO: 246 - RNA, 21 nt, synthetic construct
  source 1..21: mol_type = other RNA
gggtacgtaacctcaatggtc

SEQ ID NO: 247 - RNA, 21 nt, synthetic construct
  source 1..21: mol_type = other RNA
atcgggaagtggcgtgttcaa

SEQ ID NO: 248 - RNA, 21 nt, synthetic construct
  source 1..21: mol_type = other RNA
tggcgtgttcaagtgtggaat

SEQ ID NO: 249 - RNA, 21 nt, synthetic construct
  source 1..21: mol_type = other RNA
ttcaagtgtggaatagccgtg

SEQ ID NO: 250 - RNA, 21 nt, synthetic construct
  source 1..21: mol_type = other RNA
tgggagtactatgactcagtg

SEQ ID NO: 251 - RNA, 21 nt, synthetic construct
  source 1..21: mol_type = other RNA
atgactcagtgtacacagaac

SEQ ID NO: 252 - RNA, 21 nt, synthetic construct
  source 1..21: mol_type = other RNA
gtgtacacagaacgttacatg

SEQ ID NO: 253 - RNA, 21 nt, synthetic construct
  source 1..21: mol_type = other RNA
acagaacgttacatgggtctc

SEQ ID NO: 254 - RNA, 21 nt, synthetic construct
  source 1..21: mol_type = other RNA
gttacatgggtctcccaactc

SEQ ID NO: 255 - RNA, 21 nt, synthetic construct
  source 1..21: mol_type = other RNA
ggtctcccaactccagaagac

SEQ ID NO: 256 - RNA, 21 nt, synthetic construct
  source 1..21: mol_type = other RNA
caactccagaagacaaccttg

SEQ ID NO: 257 - RNA, 21 nt, synthetic construct
  source 1..21: mol_type = other RNA
gacaaccttgaccattacaga

SEQ ID NO: 258 - RNA, 21 nt, synthetic construct
  source 1..21: mol_type = other RNA
cttgaccattacagaaattca

SEQ ID NO: 259 - RNA, 21 nt, synthetic construct
  source 1..21: mol_type = other RNA
attacagaaattcaacagtca

SEQ ID NO: 260 - RNA, 21 nt, synthetic construct
  source 1..21: mol_type = other RNA
gaaattcaacagtcatgagca

SEQ ID NO: 261 - RNA, 21 nt, synthetic construct
  source 1..21: mol_type = other RNA
tcatgagcagagctgaaaatt

SEQ ID NO: 262 - RNA, 21 nt, synthetic construct
  source 1..21: mol_type = other RNA
gcagagctgaaaattttaaac

SEQ ID NO: 263 - RNA, 21 nt, synthetic construct
  source 1..21: mol_type = other RNA
tttaaacaagttgagtacctc

SEQ ID NO: 264 - RNA, 21 nt, synthetic construct
  source 1..21: mol_type = other RNA
agttgagtacctccttattca

SEQ ID NO: 265 - RNA, 21 nt, synthetic construct
  source 1..21: mol_type = other RNA
tacctccttattcatggaaca

SEQ ID NO: 266 - RNA, 21 nt, synthetic construct
  source 1..21: mol_type = other RNA
ttattcatggaacagcagatg

SEQ ID NO: 267 - RNA, 21 nt, synthetic construct
  source 1..21: mol_type = other RNA
gaacagcagatgataacgttc

SEQ ID NO: 268 - RNA, 21 nt, synthetic construct
  source 1..21: mol_type = other RNA
cagatgataacgttcactttc

SEQ ID NO: 269 - RNA, 21 nt, synthetic construct
  source 1..21: mol_type = other RNA
taacgttcactttcagcagtc

SEQ ID NO: 270 - RNA, 21 nt, synthetic construct
  source 1..21: mol_type = other RNA
tcactttcagcagtcagctca

SEQ ID NO: 271 - RNA, 21 nt, synthetic construct
  source 1..21: mol_type = other RNA
gcagtcagctcagatctccaa

SEQ ID NO: 272 - RNA, 21 nt, synthetic construct
  source 1..21: mol_type = other RNA
gctcagatctccaaagccctg

SEQ ID NO: 273 - RNA, 21 nt, synthetic construct
  source 1..21: mol_type = other RNA
tctccaaagccctggtcgatg

SEQ ID NO: 274 - RNA, 21 nt, synthetic construct
  source 1..21: mol_type = other RNA
gccctggtcgatgttggagtg

SEQ ID NO: 275 - RNA, 21 nt, synthetic construct
  source 1..21: mol_type = other RNA
gtcgatgttggagtggatttc

SEQ ID NO: 276 - RNA, 21 nt, synthetic construct
  source 1..21: mol_type = other RNA
agtggatttccaggcaatgtg

SEQ ID NO: 277 - RNA, 21 nt, synthetic construct
  source 1..21: mol_type = other RNA
tccaggcaatgtggtatactg

SEQ ID NO: 278 - RNA, 21 nt, synthetic construct
  source 1..21: mol_type = other RNA
aatgtggtatactgatgaaga

SEQ ID NO: 279 - RNA, 21 nt, synthetic construct
  source 1..21: mol_type = other RNA
gtatactgatgaagaccatgg

SEQ ID NO: 280 - RNA, 21 nt, synthetic construct
  source 1..21: mol_type = other RNA
atgaagaccatggaatagcta

SEQ ID NO: 281 - RNA, 21 nt, synthetic construct
  source 1..21: mol_type = other RNA
ccatggaatagctagcagcac

SEQ ID NO: 282 - RNA, 21 nt, synthetic construct
  source 1..21: mol_type = other RNA
atagctagcagcacagcacac

SEQ ID NO: 283 - RNA, 21 nt, synthetic construct
  source 1..21: mol_type = other RNA
cagcacagcacaccaacatat

SEQ ID NO: 284 - RNA, 21 nt, synthetic construct
  source 1..21: mol_type = other RNA
agcacaccaacatatatatac

SEQ ID NO: 285 - RNA, 21 nt, synthetic construct
  source 1..21: mol_type = other RNA
ccaacatatatatacccacat

SEQ ID NO: 286 - RNA, 21 nt, synthetic construct
  source 1..21: mol_type = other RNA
tacccacatgagccacttcat

SEQ ID NO: 287 - RNA, 21 nt, synthetic construct
  source 1..21: mol_type = other RNA
catgagccacttcataaaaca

SEQ ID NO: 288 - RNA, 21 nt, synthetic construct
  source 1..21: mol_type = other RNA
ccacttcataaaacaatgttt

SEQ ID NO: 289 - RNA, 21 nt, synthetic construct
  source 1..21: mol_type = other RNA
aacaatgtttctctttacctt

SEQ ID NO: 290 - RNA, 21 nt, synthetic construct
  source 1..21: mol_type = other RNA
gtttctctttaccttagcacc

SEQ ID NO: 291 - RNA, 21 nt, synthetic construct
  source 1..21: mol_type = other RNA
tttaccttagcacctcaaaat

SEQ ID NO: 292 - RNA, 21 nt, synthetic construct
  source 1..21: mol_type = other RNA
ttagcacctcaaaataccatg

SEQ ID NO: 293 - RNA, 21 nt, synthetic construct
  source 1..21: mol_type = other RNA
ctcaaaataccatgccattta

SEQ ID NO: 294 - RNA, 21 nt, synthetic construct
  source 1..21: mol_type = other RNA
taccatgccatttaaagctta

SEQ ID NO: 295 - RNA, 21 nt, synthetic construct
  source 1..21: mol_type = other RNA
ttttcattatctcaaaactgc

SEQ ID NO: 296 - RNA, 21 nt, synthetic construct
  source 1..21: mol_type = other RNA
tctcaaaactgcactgtcaag

SEQ ID NO: 297 - RNA, 21 nt, synthetic construct
  source 1..21: mol_type = other RNA
ctgcactgtcaagatgatgat

SEQ ID NO: 298 - RNA, 21 nt, synthetic construct
  source 1..21: mol_type = other RNA
caagatgatgatgatctttaa

SEQ ID NO: 299 - RNA, 21 nt, synthetic construct
  source 1..21: mol_type = other RNA
gatctttaaaatacacactca

SEQ ID NO: 300 - RNA, 21 nt, synthetic construct
  source 1..21: mol_type = other RNA
aaatacacactcaaatcaaga

SEQ ID NO: 301 - RNA, 21 nt, synthetic construct
  source 1..21: mol_type = other RNA
actcaaatcaagaaacttaag

SEQ ID NO: 302 - RNA, 21 nt, synthetic construct
  source 1..21: mol_type = other RNA
atcaagaaacttaaggttacc

SEQ ID NO: 303 - RNA, 21 nt, synthetic construct
  source 1..21: mol_type = other RNA
acttaaggttacctttgttcc

SEQ ID NO: 304 - RNA, 21 nt, synthetic construct
  source 1..21: mol_type = other RNA
acctttgttcccaaatttcat

SEQ ID NO: 305 - RNA, 21 nt, synthetic construct
  source 1..21: mol_type = other RNA
gttcccaaatttcatacctat

SEQ ID NO: 306 - RNA, 21 nt, synthetic construct
  source 1..21: mol_type = other RNA
aaatttcatacctatcatctt

SEQ ID NO: 307 - RNA, 21 nt, synthetic construct
  source 1..21: mol_type = other RNA
atacctatcatcttaagtagg

SEQ ID NO: 308 - RNA, 21 nt, synthetic construct
  source 1..21: mol_type = other RNA
catcttaagtagggacttctg

SEQ ID NO: 309 - RNA, 21 nt, synthetic construct
  source 1..21: mol_type = other RNA
agggacttctgtcttcacaac

SEQ ID NO: 310 - RNA, 21 nt, synthetic construct
  source 1..21: mol_type = other RNA
tgtcttcacaacagattatta

SEQ ID NO: 311 - RNA, 21 nt, synthetic construct
  source 1..21: mol_type = other RNA
acaacagattattaccttaca

SEQ ID NO: 312 - RNA, 21 nt, synthetic construct
  source 1..21: mol_type = other RNA
attattaccttacagaagttt

SEQ ID NO: 313 - RNA, 21 nt, synthetic construct
  source 1..21: mol_type = other RNA
accttacagaagtttgaatta

SEQ ID NO: 314 - RNA, 21 nt, synthetic construct
  source 1..21: mol_type = other RNA
agaagtttgaattatccggtc

SEQ ID NO: 315 - RNA, 21 nt, synthetic construct
  source 1..21: mol_type = other RNA
ttgaattatccggtcgggttt

SEQ ID NO: 316 - RNA, 21 nt, synthetic construct
  source 1..21: mol_type = other RNA
atccggtcgggttttattgtt

SEQ ID NO: 317 - RNA, 21 nt, synthetic construct
  source 1..21: mol_type = other RNA
tcgggttttattgtttaaaat

SEQ ID NO: 318 - RNA, 21 nt, synthetic construct
  source 1..21: mol_type = other RNA
tttaaaatcatttctgcatca

SEQ ID NO: 319 - RNA, 21 nt, synthetic construct
  source 1..21: mol_type = other RNA
tcatttctgcatcagctgctg

SEQ ID NO: 320 - RNA, 21 nt, synthetic construct
  source 1..21: mol_type = other RNA
ctgcatcagctgctgaaacaa

SEQ ID NO: 321 - RNA, 21 nt, synthetic construct
  source 1..21: mol_type = other RNA
cagctgctgaaacaacaaata

SEQ ID NO: 322 - RNA, 21 nt, synthetic construct
  source 1..21: mol_type = other RNA
aaacaacaaataggaattgtt

SEQ ID NO: 323 - RNA, 21 nt, synthetic construct
  source 1..21: mol_type = other RNA
aggaattgtttttatggaggc

SEQ ID NO: 324 - RNA, 21 nt, synthetic construct
  source 1..21: mol_type = other RNA
gtttttatggaggctttgcat

SEQ ID NO: 325 - RNA, 21 nt, synthetic construct
  source 1..21: mol_type = other RNA
aggctttgcatagattccctg

SEQ ID NO: 326 - RNA, 21 nt, synthetic construct
  source 1..21: mol_type = other RNA
tgcatagattccctgagcagg

SEQ ID NO: 327 - RNA, 21 nt, synthetic construct
  source 1..21: mol_type = other RNA
attccctgagcaggattttaa

SEQ ID NO: 328 - RNA, 21 nt, synthetic construct
  source 1..21: mol_type = other RNA
tgagcaggattttaatctttt

SEQ ID NO: 329 - RNA, 21 nt, synthetic construct
  source 1..21: mol_type = other RNA
taatctttttctaactggact

SEQ ID NO: 330 - RNA, 21 nt, synthetic construct
  source 1..21: mol_type = other RNA
tctaactggactggttcaaat

SEQ ID NO: 331 - RNA, 21 nt, synthetic construct
  source 1..21: mol_type = other RNA
ggactggttcaaatgttgttc

SEQ ID NO: 332 - RNA, 21 nt, synthetic construct
  source 1..21: mol_type = other RNA
aaatgttgttctcttctttaa

SEQ ID NO: 333 - RNA, 21 nt, synthetic construct
  source 1..21: mol_type = other RNA
ttctcttctttaaagggatgg

SEQ ID NO: 334 - RNA, 21 nt, synthetic construct
  source 1..21: mol_type = other RNA
ctttaaagggatggcaagatg

SEQ ID NO: 335 - RNA, 21 nt, synthetic construct
  source 1..21: mol_type = other RNA
ggcaagatgtgggcagtgatg

SEQ ID NO: 336 - RNA, 21 nt, synthetic construct
  source 1..21: mol_type = other RNA
tgggcagtgatgtcactaggg

SEQ ID NO: 337 - RNA, 21 nt, synthetic construct
  source 1..21: mol_type = other RNA
gggacaggataagagggatta

SEQ ID NO: 338 - RNA, 21 nt, synthetic construct
  source 1..21: mol_type = other RNA
ggataagagggattagggaga

SEQ ID NO: 339 - RNA, 21 nt, synthetic construct
  source 1..21: mol_type = other RNA
agggattagggagagaagata

SEQ ID NO: 340 - RNA, 21 nt, synthetic construct
  source 1..21: mol_type = other RNA
tagggagagaagatagcaggg

SEQ ID NO: 341 - RNA, 21 nt, synthetic construct
  source 1..21: mol_type = other RNA
ctgggaacccaagtccaagca

SEQ ID NO: 342 - RNA, 21 nt, synthetic construct
  source 1..21: mol_type = other RNA
acccaagtccaagcataccaa

SEQ ID NO: 343 - RNA, 21 nt, synthetic construct
  source 1..21: mol_type = other RNA
gtccaagcataccaacacgag

SEQ ID NO: 344 - RNA, 21 nt, synthetic construct
  source 1..21: mol_type = other RNA
caacacgagcaggctactgtc

SEQ ID NO: 345 - RNA, 21 nt, synthetic construct
  source 1..21: mol_type = other RNA
gagcaggctactgtcagctcc

SEQ ID NO: 346 - RNA, 21 nt, synthetic construct
  source 1..21: mol_type = other RNA
cggagaagagctgttcacagc

SEQ ID NO: 347 - RNA, 21 nt, synthetic construct
  source 1..21: mol_type = other RNA
gagctgttcacagccagactg

SEQ ID NO: 348 - RNA, 21 nt, synthetic construct
  source 1..21: mol_type = other RNA
acagccagactggcacagttt

SEQ ID NO: 349 - RNA, 21 nt, synthetic construct
  source 1..21: mol_type = other RNA
tggcacagttttctgagaaag

SEQ ID NO: 350 - RNA, 21 nt, synthetic construct
  source 1..21: mol_type = other RNA
agttttctgagaaagactatt

SEQ ID NO: 351 - RNA, 21 nt, synthetic construct
  source 1..21: mol_type = other RNA
ctgagaaagactattcaaaca

SEQ ID NO: 352 - RNA, 21 nt, synthetic construct
  source 1..21: mol_type = other RNA
aagactattcaaacagtctca

SEQ ID NO: 353 - RNA, 21 nt, synthetic construct
  source 1..21: mol_type = other RNA
ttcaaacagtctcaggaaatc

SEQ ID NO: 354 - RNA, 21 nt, synthetic construct
  source 1..21: mol_type = other RNA
gtctcaggaaatcaaatatgc

SEQ ID NO: 355 - RNA, 21 nt, synthetic construct
  source 1..21: mol_type = other RNA
ggaaatcaaatatgcaaagca

SEQ ID NO: 356 - RNA, 21 nt, synthetic construct
  source 1..21: mol_type = other RNA
caaatatgcaaagcactgact

SEQ ID NO: 357 - RNA, 21 nt, synthetic construct
  source 1..21: mol_type = other RNA
tgcaaagcactgacttctaag

SEQ ID NO: 358 - RNA, 21 nt, synthetic construct
  source 1..21: mol_type = other RNA
gcactgacttctaagtaaaac

SEQ ID NO: 359 - RNA, 21 nt, synthetic construct
  source 1..21: mol_type = other RNA
acttctaagtaaaaccacagc

SEQ ID NO: 360 - RNA, 21 nt, synthetic construct
  source 1..21: mol_type = other RNA
gtaaaaccacagcagttgaaa

SEQ ID NO: 361 - RNA, 21 nt, synthetic construct
  source 1..21: mol_type = other RNA
ccacagcagttgaaaagactc

SEQ ID NO: 362 - RNA, 21 nt, synthetic construct
  source 1..21: mol_type = other RNA
ttgaaaagactccaaagaaat

SEQ ID NO: 363 - RNA, 21 nt, synthetic construct
  source 1..21: mol_type = other RNA
agactccaaagaaatgtaagg

SEQ ID NO: 364 - RNA, 21 nt, synthetic construct
  source 1..21: mol_type = other RNA
aaagaaatgtaagggaaactg

SEQ ID NO: 365 - RNA, 21 nt, synthetic construct
  source 1..21: mol_type = other RNA
aagggaaactgccagcaacgc

SEQ ID NO: 366 - RNA, 21 nt, synthetic construct
  source 1..21: mol_type = other RNA
gtgccagttatggctataggt

SEQ ID NO: 367 - RNA, 21 nt, synthetic construct
  source 1..21: mol_type = other RNA
atggctataggtgctacaaaa

SEQ ID NO: 368 - RNA, 21 nt, synthetic construct
  source 1..21: mol_type = other RNA
acagcaagggtgatgggaaag

SEQ ID NO: 369 - RNA, 21 nt, synthetic construct
  source 1..21: mol_type = other RNA
gggtgatgggaaagcattgta

SEQ ID NO: 370 - RNA, 21 nt, synthetic construct
  source 1..21: mol_type = other RNA
tgggaaagcattgtaaatgtg

SEQ ID NO: 371 - RNA, 21 nt, synthetic construct
  source 1..21: mol_type = other RNA
agcattgtaaatgtgctttta

SEQ ID NO: 372 - RNA, 21 nt, synthetic construct
  source 1..21: mol_type = other RNA
actgatgttcctagtgaaaga

SEQ ID NO: 373 - RNA, 21 nt, synthetic construct
  source 1..21: mol_type = other RNA
gttcctagtgaaagaggcagc

SEQ ID NO: 374 - RNA, 21 nt, synthetic construct
  source 1..21: mol_type = other RNA
gtgaaagaggcagcttgaaac

SEQ ID NO: 375 - RNA, 21 nt, synthetic construct
  source 1..21: mol_type = other RNA
aggcagcttgaaactgagatg

SEQ ID NO: 376 - RNA, 21 nt, synthetic construct
  source 1..21: mol_type = other RNA
aaactgagatgtgaacacatc

SEQ ID NO: 377 - RNA, 21 nt, synthetic construct
  source 1..21: mol_type = other RNA
agatgtgaacacatcagcttg

SEQ ID NO: 378 - RNA, 21 nt, synthetic construct
  source 1..21: mol_type = other RNA
catcagcttgccctgttaaaa

SEQ ID NO: 379 - RNA, 21 nt, synthetic construct
  source 1..21: mol_type = other RNA
cttgccctgttaaaagatgaa

SEQ ID NO: 380 - RNA, 21 nt, synthetic construct
  source 1..21: mol_type = other RNA
gtatcacaaatcttaacttga

SEQ ID NO: 381 - RNA, 21 nt, synthetic construct
  source 1..21: mol_type = other RNA
aaatcttaacttgaaggagtc

SEQ ID NO: 382 - RNA, 21 nt, synthetic construct
  source 1..21: mol_type = other RNA
aacttgaaggagtccttgcat

SEQ ID NO: 383 - RNA, 21 nt, synthetic construct
  source 1..21: mol_type = other RNA
aaggagtccttgcatcaattt

SEQ ID NO: 384 - RNA, 21 nt, synthetic construct
  source 1..21: mol_type = other RNA
tccttgcatcaatttttctta

SEQ ID NO: 385 - RNA, 21 nt, synthetic construct
  source 1..21: mol_type = other RNA
ttatttcatttctttgagtgt

SEQ ID NO: 386 - RNA, 21 nt, synthetic construct
  source 1..21: mol_type = other RNA
atttctttgagtgtcttaatt

SEQ ID NO: 387 - RNA, 21 nt, synthetic construct
  source 1..21: mol_type = other RNA
ttgagtgtcttaattaaaaga

SEQ ID NO: 388 - RNA, 21 nt, synthetic construct
  source 1..21: mol_type = other RNA
gaatattttaacttccttgga

SEQ ID NO: 389 - RNA, 21 nt, synthetic construct
  source 1..21: mol_type = other RNA
tttaacttccttggactcatt

SEQ ID NO: 390 - RNA, 21 nt, synthetic construct
  source 1..21: mol_type = other RNA
ttccttggactcattttaaaa

SEQ ID NO: 391 - RNA, 21 nt, synthetic construct
  source 1..21: mol_type = other RNA
tattattattcccattctaca

SEQ ID NO: 392 - RNA, 21 nt, synthetic construct
  source 1..21: mol_type = other RNA
attcccattctacatactatg

SEQ ID NO: 393 - RNA, 21 nt, synthetic construct
  source 1..21: mol_type = other RNA
ctacatactatggaatttctc

SEQ ID NO: 394 - RNA, 21 nt, synthetic construct
  source 1..21: mol_type = other RNA
tggaatttctcccagtcattt

SEQ ID NO: 395 - RNA, 21 nt, synthetic construct
  source 1..21: mol_type = other RNA
cccagtcatttaataaatgtg

SEQ ID NO: 396 - RNA, 21 nt, synthetic construct
  source 1..21: mol_type = other RNA
catttaataaatgtgccttca

SEQ ID NO: 397 - RNA, 23 nt, synthetic construct
  source 1..23: mol_type = other RNA
gagttaaacattagtgagcgccg

SEQ ID NO: 398 - RNA, 23 nt, synthetic construct
  source 1..23: mol_type = other RNA
gagtcactcgccgctggcaagtt

SEQ ID NO: 399 - RNA, 23 nt, synthetic construct
  source 1..23: mol_type = other RNA
agagaaggagcgcaggcagaagt

SEQ ID NO: 400 - RNA, 23 nt, synthetic construct
  source 1..23: mol_type = other RNA
gagcgttcagagaaggagcgcag

SEQ ID NO: 401 - RNA, 23 nt, synthetic construct
  source 1..23: mol_type = other RNA
ggaagtgagcgttcagagaagga

SEQ ID NO: 402 - RNA, 23 nt, synthetic construct
  source 1..23: mol_type = other RNA
cgtctcctcggaagtgagcgttc

SEQ ID NO: 403 - RNA, 23 nt, synthetic construct
  source 1..23: mol_type = other RNA
catcgtcggcgtctcctcggaag

SEQ ID NO: 404 - RNA, 23 nt, synthetic construct
  source 1..23: mol_type = other RNA
cacggtgtcttcatcgtcggcgt

SEQ ID NO: 405 - RNA, 23 nt, synthetic construct
  source 1..23: mol_type = other RNA
aaccttccacggtgtcttcatcg

SEQ ID NO: 406 - RNA, 23 nt, synthetic construct
  source 1..23: mol_type = other RNA
cagaagaaccttccacggtgtct

SEQ ID NO: 407 - RNA, 23 nt, synthetic construct
  source 1..23: mol_type = other RNA
cagtcccagaagaaccttccacg

SEQ ID NO: 408 - RNA, 23 nt, synthetic construct
  source 1..23: mol_type = other RNA
atggtgacaagcgcagcagcacc

SEQ ID NO: 409 - RNA, 23 nt, synthetic construct
  source 1..23: mol_type = other RNA
gtgatgatggtgacaagcgcagc

SEQ ID NO: 410 - RNA, 23 nt, synthetic construct
  source 1..23: mol_type = other RNA
ttcagcagaaccacgggcacggt

SEQ ID NO: 411 - RNA, 23 nt, synthetic construct
  source 1..23: mol_type = other RNA
cctttgttcagcagaaccacggg

SEQ ID NO: 412 - RNA, 23 nt, synthetic construct
  source 1..23: mol_type = other RNA
catctgtgcctttgttcagcaga

SEQ ID NO: 413 - RNA, 23 nt, synthetic construct
  source 1..23: mol_type = other RNA
tagcatcatctgtgcctttgttc

SEQ ID NO: 414 - RNA, 23 nt, synthetic construct
  source 1..23: mol_type = other RNA
cagctgtagcatcatctgtgcct

SEQ ID NO: 415 - RNA, 23 nt, synthetic construct
  source 1..23: mol_type = other RNA
gcgactgtcagctgtagcatcat

SEQ ID NO: 416 - RNA, 23 nt, synthetic construct
  source 1..23: mol_type = other RNA
aagttttgcgactgtcagctgta

SEQ ID NO: 417 - RNA, 23 nt, synthetic construct
  source 1..23: mol_type = other RNA
gagtgtaagttttgcgactgtca

SEQ ID NO: 418 - RNA, 23 nt, synthetic construct
  source 1..23: mol_type = other RNA
taatcagttagagtgtaagtttt

SEQ ID NO: 419 - RNA, 23 nt, synthetic construct
  source 1..23: mol_type = other RNA
tttaagtaatcagttagagtgta

SEQ ID NO: 420 - RNA, 23 nt, synthetic construct
  source 1..23: mol_type = other RNA
gagtataacttcagtctataagt

SEQ ID NO: 421 - RNA, 23 nt, synthetic construct
  source 1..23: mol_type = other RNA
catcttaaggagtataacttcag

SEQ ID NO: 422 - RNA, 23 nt, synthetic construct
  source 1..23: mol_type = other RNA
tctgaaatccatcttaaggagta

SEQ ID NO: 423 - RNA, 23 nt, synthetic construct
  source 1..23: mol_type = other RNA
ttcatgatctgaaatccatctta

SEQ ID NO: 424 - RNA, 23 nt, synthetic construct
  source 1..23: mol_type = other RNA
gagatattcatgatctgaaatcc

SEQ ID NO: 425 - RNA, 23 nt, synthetic construct
  source 1..23: mol_type = other RNA
gtttgtagagatattcatgatct

SEQ ID NO: 426 - RNA, 23 nt, synthetic construct
  source 1..23: mol_type = other RNA
ttttcttgtttgtagagatattc

SEQ ID NO: 427 - RNA, 23 nt, synthetic construct
  source 1..23: mol_type = other RNA
ttcagcattgaataccaagatat

SEQ ID NO: 428 - RNA, 23 nt, synthetic construct
  source 1..23: mol_type = other RNA
tccatattcagcattgaatacca

SEQ ID NO: 429 - RNA, 23 nt, synthetic construct
  source 1..23: mol_type = other RNA
gctgtttccatattcagcattga

SEQ ID NO: 430 - RNA, 23 nt, synthetic construct
  source 1..23: mol_type = other RNA
aaactgagctgtttccatattca

SEQ ID NO: 431 - RNA, 23 nt, synthetic construct
  source 1..23: mol_type = other RNA
ccaagaaaactgagctgtttcca

SEQ ID NO: 432 - RNA, 23 nt, synthetic construct
  source 1..23: mol_type = other RNA
gtactgttctccaagaaaactga

SEQ ID NO: 433 - RNA, 23 nt, synthetic construct
  source 1..23: mol_type = other RNA
tcatcaaatgtactgttctccaa

SEQ ID NO: 434 - RNA, 23 nt, synthetic construct
  source 1..23: mol_type = other RNA
ccaaactcatcaaatgtactgtt

SEQ ID NO: 435 - RNA, 23 nt, synthetic construct
  source 1..23: mol_type = other RNA
tagaatgtccaaactcatcaaat

SEQ ID NO: 436 - RNA, 23 nt, synthetic construct
  source 1..23: mol_type = other RNA
cattgatagaatgtccaaactca

SEQ ID NO: 437 - RNA, 23 nt, synthetic construct
  source 1..23: mol_type = other RNA
aataatcattgatagaatgtcca

SEQ ID NO: 438 - RNA, 23 nt, synthetic construct
  source 1..23: mol_type = other RNA
caggagatattgaataatcattg

SEQ ID NO: 439 - RNA, 23 nt, synthetic construct
  source 1..23: mol_type = other RNA
gagaataaactgcccatcaggag

SEQ ID NO: 440 - RNA, 23 nt, synthetic construct
  source 1..23: mol_type = other RNA
tattctaagagaataaactgccc

SEQ ID NO: 441 - RNA, 23 nt, synthetic construct
  source 1..23: mol_type = other RNA
cacgtagttgtattctaagagaa

SEQ ID NO: 442 - RNA, 23 nt, synthetic construct
  source 1..23: mol_type = other RNA
cattgcttcacgtagttgtattc

SEQ ID NO: 443 - RNA, 23 nt, synthetic construct
  source 1..23: mol_type = other RNA
gaatgcctccattgcttcacgta

SEQ ID NO: 444 - RNA, 23 nt, synthetic construct
  source 1..23: mol_type = other RNA
gaagctgtgtaggaatgcctcca

SEQ ID NO: 445 - RNA, 23 nt, synthetic construct
  source 1..23: mol_type = other RNA
tcatatgaagctgtgtaggaatg

SEQ ID NO: 446 - RNA, 23 nt, synthetic construct
  source 1..23: mol_type = other RNA
taaatgtcatatgaagctgtgta

SEQ ID NO: 447 - RNA, 23 nt, synthetic construct
  source 1..23: mol_type = other RNA
aaatcataaatgtcatatgaagc

SEQ ID NO: 448 - RNA, 23 nt, synthetic construct
  source 1..23: mol_type = other RNA
agctgccttttatttaaatcata

SEQ ID NO: 449 - RNA, 23 nt, synthetic construct
  source 1..23: mol_type = other RNA
gtaatcagctgccttttatttaa

SEQ ID NO: 450 - RNA, 23 nt, synthetic construct
  source 1..23: mol_type = other RNA
ctcttctgtaatcagctgccttt

SEQ ID NO: 451 - RNA, 23 nt, synthetic construct
  source 1..23: mol_type = other RNA
gaatcctctcttctgtaatcagc

SEQ ID NO: 452 - RNA, 23 nt, synthetic construct
  source 1..23: mol_type = other RNA
tgttgtttggaatcctctcttct

SEQ ID NO: 453 - RNA, 23 nt, synthetic construct
  source 1..23: mol_type = other RNA
cactgtgtgttgtttggaatcct

SEQ ID NO: 454 - RNA, 23 nt, synthetic construct
  source 1..23: mol_type = other RNA
catgtgacccactgtgtgttgtt

SEQ ID NO: 455 - RNA, 23 nt, synthetic construct
  source 1..23: mol_type = other RNA
cactggtgaccatgtgacccact

SEQ ID NO: 456 - RNA, 23 nt, synthetic construct
  source 1..23: mol_type = other RNA
ttatgacccactggtgaccatgt

SEQ ID NO: 457 - RNA, 23 nt, synthetic construct
  source 1..23: mol_type = other RNA
tatgccaatttatgacccactgg

SEQ ID NO: 458 - RNA, 23 nt, synthetic construct
  source 1..23: mol_type = other RNA
ccaaacatatgccaatttatgac

SEQ ID NO: 459 - RNA, 23 nt, synthetic construct
  source 1..23: mol_type = other RNA
tcattgttccaaacatatgccaa

SEQ ID NO: 460 - RNA, 23 nt, synthetic construct
  source 1..23: mol_type = other RNA
aacataaatgtcattgttccaaa

SEQ ID NO: 461 - RNA, 23 nt, synthetic construct
  source 1..23: mol_type = other RNA
aacttggtaaatttggttcaatt

SEQ ID NO: 462 - RNA, 23 nt, synthetic construct
  source 1..23: mol_type = other RNA
ttctgtaacttggtaaatttggt

SEQ ID NO: 463 - RNA, 23 nt, synthetic construct
  source 1..23: mol_type = other RNA
catgtgattctgtaacttggtaa

SEQ ID NO: 464 - RNA, 23 nt, synthetic construct
  source 1..23: mol_type = other RNA
cccgtccatgtgattctgtaact

SEQ ID NO: 465 - RNA, 23 nt, synthetic construct
  source 1..23: mol_type = other RNA
ccagtcagttattccattatata

SEQ ID NO: 466 - RNA, 23 nt, synthetic construct
  source 1..23: mol_type = other RNA
cataaacccagtcagttattcca

SEQ ID NO: 467 - RNA, 23 nt, synthetic construct
  source 1..23: mol_type = other RNA
ttcctcttcataaacccagtcag

SEQ ID NO: 468 - RNA, 23 nt, synthetic construct
  source 1..23: mol_type = other RNA
gaagacttcctcttcataaaccc

SEQ ID NO: 469 - RNA, 23 nt, synthetic construct
  source 1..23: mol_type = other RNA
ggcactgaagacttcctcttcat

SEQ ID NO: 470 - RNA, 23 nt, synthetic construct
  source 1..23: mol_type = other RNA
cagagtaggcactgaagacttcc

SEQ ID NO: 471 - RNA, 23 nt, synthetic construct
  source 1..23: mol_type = other RNA
caccacagagcagagtaggcact

SEQ ID NO: 472 - RNA, 23 nt, synthetic construct
  source 1..23: mol_type = other RNA
ccgtttggagaccaccacagagc

SEQ ID NO: 473 - RNA, 23 nt, synthetic construct
  source 1..23: mol_type = other RNA
aaaaagtgccgtttggagaccac

SEQ ID NO: 474 - RNA, 23 nt, synthetic construct
  source 1..23: mol_type = other RNA
cgttaaattgggcatatgctaaa

SEQ ID NO: 475 - RNA, 23 nt, synthetic construct
  source 1..23: mol_type = other RNA
tctgtgtcgttaaattgggcata

SEQ ID NO: 476 - RNA, 23 nt, synthetic construct
  source 1..23: mol_type = other RNA
tgggacttctgtgtcgttaaatt

SEQ ID NO: 477 - RNA, 23 nt, synthetic construct
  source 1..23: mol_type = other RNA
ttcaataagtgggacttctgtgt

SEQ ID NO: 478 - RNA, 23 nt, synthetic construct
  source 1..23: mol_type = other RNA
ggagtattcaataagtgggactt

SEQ ID NO: 479 - RNA, 23 nt, synthetic construct
  source 1..23: mol_type = other RNA
gagtagaaggagtattcaataag

SEQ ID NO: 480 - RNA, 23 nt, synthetic construct
  source 1..23: mol_type = other RNA
gactcatcagagtagaaggagta

SEQ ID NO: 481 - RNA, 23 nt, synthetic construct
  source 1..23: mol_type = other RNA
ggtactgcagtgactcatcagag

SEQ ID NO: 482 - RNA, 23 nt, synthetic construct
  source 1..23: mol_type = other RNA
agtctttgggtactgcagtgact

SEQ ID NO: 483 - RNA, 23 nt, synthetic construct
  source 1..23: mol_type = other RNA
cccgtacagtctttgggtactgc

SEQ ID NO: 484 - RNA, 23 nt, synthetic construct
  source 1..23: mol_type = other RNA
gatatggaacccgtacagtcttt

SEQ ID NO: 485 - RNA, 23 nt, synthetic construct
  source 1..23: mol_type = other RNA
ctgcctttggatatggaacccgt

SEQ ID NO: 486 - RNA, 23 nt, synthetic construct
  source 1..23: mol_type = other RNA
tacagttggattcacagctcctg

SEQ ID NO: 487 - RNA, 23 nt, synthetic construct
  source 1..23: mol_type = other RNA
gaactttacagttggattcacag

SEQ ID NO: 488 - RNA, 23 nt, synthetic construct
  source 1..23: mol_type = other RNA
caacaaagaactttacagttgga

SEQ ID NO: 489 - RNA, 23 nt, synthetic construct
  source 1..23: mol_type = other RNA
gtctgtatttacaacaaagaact

SEQ ID NO: 490 - RNA, 23 nt, synthetic construct
  source 1..23: mol_type = other RNA
gagagagtctgtatttacaacaa

SEQ ID NO: 491 - RNA, 23 nt, synthetic construct
  source 1..23: mol_type = other RNA
gtgactgagctgagagagtctgt

SEQ ID NO: 492 - RNA, 23 nt, synthetic construct
  source 1..23: mol_type = other RNA
gcattggtgactgagctgagaga

SEQ ID NO: 493 - RNA, 23 nt, synthetic construct
  source 1..23: mol_type = other RNA
ggaagttgcattggtgactgagc

SEQ ID NO: 494 - RNA, 23 nt, synthetic construct
  source 1..23: mol_type = other RNA
tttgtatggaagttgcattggtg

SEQ ID NO: 495 - RNA, 23 nt, synthetic construct
  source 1..23: mol_type = other RNA
cagtgatttgtatggaagttgca

SEQ ID NO: 496 - RNA, 23 nt, synthetic construct
  source 1..23: mol_type = other RNA
caggagcagtgatttgtatggaa

SEQ ID NO: 497 - RNA, 23 nt, synthetic construct
  source 1..23: mol_type = other RNA
catagaagcaggagcagtgattt

SEQ ID NO: 498 - RNA, 23 nt, synthetic construct
  source 1..23: mol_type = other RNA
cctatcaacatagaagcaggagc

SEQ ID NO: 499 - RNA, 23 nt, synthetic construct
  source 1..23: mol_type = other RNA
cacatcacacaagtagtgatccc

SEQ ID NO: 500 - RNA, 23 nt, synthetic construct
  source 1..23: mol_type = other RNA
ccatgtcacatcacacaagtagt

SEQ ID NO: 501 - RNA, 23 nt, synthetic construct
  source 1..23: mol_type = other RNA
tttcttgtgttgcccatgtcaca

SEQ ID NO: 502 - RNA, 23 nt, synthetic construct
  source 1..23: mol_type = other RNA
aaattctttcttgtgttgcccat

SEQ ID NO: 503 - RNA, 23 nt, synthetic construct
  source 1..23: mol_type = other RNA
gcaaagaaattctttcttgtgtt

SEQ ID NO: 504 - RNA, 23 nt, synthetic construct
  source 1..23: mol_type = other RNA
gccactgcaaagaaattctttct

SEQ ID NO: 505 - RNA, 23 nt, synthetic construct
  source 1..23: mol_type = other RNA
ttctgaatcctcctgagccactg

SEQ ID NO: 506 - RNA, 23 nt, synthetic construct
  source 1..23: mol_type = other RNA
gaatagttctgaatcctcctgag

SEQ ID NO: 507 - RNA, 23 nt, synthetic construct
  source 1..23: mol_type = other RNA
atgaccgaatagttctgaatcct

SEQ ID NO: 508 - RNA, 23 nt, synthetic construct
  source 1..23: mol_type = other RNA
caaatatccatgaccgaatagtt

SEQ ID NO: 509 - RNA, 23 nt, synthetic construct
  source 1..23: mol_type = other RNA
tagtcacaaatatccatgaccga

SEQ ID NO: 510 - RNA, 23 nt, synthetic construct
  source 1..23: mol_type = other RNA
tcatcatagtcacaaatatccat

SEQ ID NO: 511 - RNA, 23 nt, synthetic construct
  source 1..23: mol_type = other RNA
actggattcatcatagtcacaaa

SEQ ID NO: 512 - RNA, 23 nt, synthetic construct
  source 1..23: mol_type = other RNA
ccatcttccactggattcatcat

SEQ ID NO: 513 - RNA, 23 nt, synthetic construct
  source 1..23: mol_type = other RNA
aagcagttccatcttccactgga

SEQ ID NO: 514 - RNA, 23 nt, synthetic construct
  source 1..23: mol_type = other RNA
gccactaagcagttccatcttcc

SEQ ID NO: 515 - RNA, 23 nt, synthetic construct
  source 1..23: mol_type = other RNA
gttgccgtgccactaagcagttc

SEQ ID NO: 516 - RNA, 23 nt, synthetic construct
  source 1..23: mol_type = other RNA
caatgtgttgccgtgccactaag

SEQ ID NO: 517 - RNA, 23 nt, synthetic construct
  source 1..23: mol_type = other RNA
tactcatttcaatgtgttgccgt

SEQ ID NO: 518 - RNA, 23 nt, synthetic construct
  source 1..23: mol_type = other RNA
cagtagtactcatttcaatgtgt

SEQ ID NO: 519 - RNA, 23 nt, synthetic construct
  source 1..23: mol_type = other RNA
ccaacccagccagtagtactcat

SEQ ID NO: 520 - RNA, 23 nt, synthetic construct
  source 1..23: mol_type = other RNA
ctaaatcttccaacccagccagt

SEQ ID NO: 521 - RNA, 23 nt, synthetic construct
  source 1..23: mol_type = other RNA
gaaggcctaaatcttccaaccca

SEQ ID NO: 522 - RNA, 23 nt, synthetic construct
  source 1..23: mol_type = other RNA
gaggttctgaaggcctaaatctt

SEQ ID NO: 523 - RNA, 23 nt, synthetic construct
  source 1..23: mol_type = other RNA
ggtaaaatgaggttctgaaggcc

SEQ ID NO: 524 - RNA, 23 nt, synthetic construct
  source 1..23: mol_type = other RNA
atcaagggtaaaatgaggttctg

SEQ ID NO: 525 - RNA, 23 nt, synthetic construct
  source 1..23: mol_type = other RNA
attaccatcaagggtaaaatgag

SEQ ID NO: 526 - RNA, 23 nt, synthetic construct
  source 1..23: mol_type = other RNA
gaagctattaccatcaagggtaa

SEQ ID NO: 527 - RNA, 23 nt, synthetic construct
  source 1..23: mol_type = other RNA
tcttgtagaagctattaccatca

SEQ ID NO: 528 - RNA, 23 nt, synthetic construct
  source 1..23: mol_type = other RNA
ctgatgatcttgtagaagctatt

SEQ ID NO: 529 - RNA, 23 nt, synthetic construct
  source 1..23: mol_type = other RNA
tcttcattgctgatgatcttgta

SEQ ID NO: 530 - RNA, 23 nt, synthetic construct
  source 1..23: mol_type = other RNA
tctgtaaccttcttcattgctga

SEQ ID NO: 531 - RNA, 23 nt, synthetic construct
  source 1..23: mol_type = other RNA
gcaaatgtgtctgtaaccttctt

SEQ ID NO: 532 - RNA, 23 nt, synthetic construct
  source 1..23: mol_type = other RNA
ggaaatagcaaatgtgtctgtaa

SEQ ID NO: 533 - RNA, 23 nt, synthetic construct
  source 1..23: mol_type = other RNA
tctatttggaaatagcaaatgtg

SEQ ID NO: 534 - RNA, 23 nt, synthetic construct
  source 1..23: mol_type = other RNA
ttttgtaataaatgtgcagtctt

SEQ ID NO: 535 - RNA, 23 nt, synthetic construct
  source 1..23: mol_type = other RNA
ggtgccttttgtaataaatgtgc

SEQ ID NO: 536 - RNA, 23 nt, synthetic construct
  source 1..23: mol_type = other RNA
cttcccaggtgccttttgtaata

SEQ ID NO: 537 - RNA, 23 nt, synthetic construct
  source 1..23: mol_type = other RNA
cccgatgacttcccaggtgcctt

SEQ ID NO: 538 - RNA, 23 nt, synthetic construct
  source 1..23: mol_type = other RNA
ttctatcccgatgacttcccagg

SEQ ID NO: 539 - RNA, 23 nt, synthetic construct
  source 1..23: mol_type = other RNA
tagagcttctatcccgatgactt

SEQ ID NO: 540 - RNA, 23 nt, synthetic construct
  source 1..23: mol_type = other RNA
cactggttagagcttctatcccg

SEQ ID NO: 541 - RNA, 23 nt, synthetic construct
  source 1..23: mol_type = other RNA
tagataatcactggttagagctt

SEQ ID NO: 542 - RNA, 23 nt, synthetic construct
  source 1..23: mol_type = other RNA
gtagtatagataatcactggtta

SEQ ID NO: 543 - RNA, 23 nt, synthetic construct
  source 1..23: mol_type = other RNA
actaatgtagtatagataatcac

SEQ ID NO: 544 - RNA, 23 nt, synthetic construct
  source 1..23: mol_type = other RNA
ggcattcctttatattcattact

SEQ ID NO: 545 - RNA, 23 nt, synthetic construct
  source 1..23: mol_type = other RNA
cctcctggcattcctttatattc

SEQ ID NO: 546 - RNA, 23 nt, synthetic construct
  source 1..23: mol_type = other RNA
tataaagattccttcctcctggc

SEQ ID NO: 547 - RNA, 23 nt, synthetic construct
  source 1..23: mol_type = other RNA
ggattttataaagattccttcct

SEQ ID NO: 548 - RNA, 23 nt, synthetic construct
  source 1..23: mol_type = other RNA
tcactaagttggattttataaag

SEQ ID NO: 549 - RNA, 23 nt, synthetic construct
  source 1..23: mol_type = other RNA
ttttgtatagtcactaagttgga

SEQ ID NO: 550 - RNA, 23 nt, synthetic construct
  source 1..23: mol_type = other RNA
catgtcacttttgtatagtcact

SEQ ID NO: 551 - RNA, 23 nt, synthetic construct
  source 1..23: mol_type = other RNA
caactgaggcatgtcacttttgt

SEQ ID NO: 552 - RNA, 23 nt, synthetic construct
  source 1..23: mol_type = other RNA
ggattcagctcacaactgaggca

SEQ ID NO: 553 - RNA, 23 nt, synthetic construct
  source 1..23: mol_type = other RNA
acacctttccggattcagctcac

SEQ ID NO: 554 - RNA, 23 nt, synthetic construct
  source 1..23: mol_type = other RNA
atagtactgacacctttccggat

SEQ ID NO: 555 - RNA, 23 nt, synthetic construct
  source 1..23: mol_type = other RNA
cacagaatagtactgacaccttt

SEQ ID NO: 556 - RNA, 23 nt, synthetic construct
  source 1..23: mol_type = other RNA
gaatgacacagaatagtactgac

SEQ ID NO: 557 - RNA, 23 nt, synthetic construct
  source 1..23: mol_type = other RNA
cctctttactgaatgacacagaa

SEQ ID NO: 558 - RNA, 23 nt, synthetic construct
  source 1..23: mol_type = other RNA
aatacttcgcctctttactgaat

SEQ ID NO: 559 - RNA, 23 nt, synthetic construct
  source 1..23: mol_type = other RNA
cagctgataatacttcgcctctt

SEQ ID NO: 560 - RNA, 23 nt, synthetic construct
  source 1..23: mol_type = other RNA
gaacatctcagctgataatactt

SEQ ID NO: 561 - RNA, 23 nt, synthetic construct
  source 1..23: mol_type = other RNA
gctgctgtgtagagtatagaggg

SEQ ID NO: 562 - RNA, 23 nt, synthetic construct
  source 1..23: mol_type = other RNA
cattcacgctgctgtgtagagta

SEQ ID NO: 563 - RNA, 23 nt, synthetic construct
  source 1..23: mol_type = other RNA
ccctttatcattcacgctgctgt

SEQ ID NO: 564 - RNA, 23 nt, synthetic construct
  source 1..23: mol_type = other RNA
gactctcagccctttatcattca

SEQ ID NO: 565 - RNA, 23 nt, synthetic construct
  source 1..23: mol_type = other RNA
gtcttccaggactctcagccctt

SEQ ID NO: 566 - RNA, 23 nt, synthetic construct
  source 1..23: mol_type = other RNA
gctgaattgtcttccaggactct

SEQ ID NO: 567 - RNA, 23 nt, synthetic construct
  source 1..23: mol_type = other RNA
tatccaaagctgaattgtcttcc

SEQ ID NO: 568 - RNA, 23 nt, synthetic construct
  source 1..23: mol_type = other RNA
cagcattttatccaaagctgaat

SEQ ID NO: 569 - RNA, 23 nt, synthetic construct
  source 1..23: mol_type = other RNA
gacattctgcagcattttatcca

SEQ ID NO: 570 - RNA, 23 nt, synthetic construct
  source 1..23: mol_type = other RNA
catctggacattctgcagcattt

SEQ ID NO: 571 - RNA, 23 nt, synthetic construct
  source 1..23: mol_type = other RNA
attcaaaataatgaagtccagtt

SEQ ID NO: 572 - RNA, 23 nt, synthetic construct
  source 1..23: mol_type = other RNA
tctgataccaaaattttgtttca

SEQ ID NO: 573 - RNA, 23 nt, synthetic construct
  source 1..23: mol_type = other RNA
ggcaagatcatctgataccaaaa

SEQ ID NO: 574 - RNA, 23 nt, synthetic construct
  source 1..23: mol_type = other RNA
atgaggaggcaagatcatctgat

SEQ ID NO: 575 - RNA, 23 nt, synthetic construct
  source 1..23: mol_type = other RNA
atcaaaatgaggaggcaagatca

SEQ ID NO: 576 - RNA, 23 nt, synthetic construct
  source 1..23: mol_type = other RNA
ggatttatcaaaatgaggaggca

SEQ ID NO: 577 - RNA, 23 nt, synthetic construct
  source 1..23: mol_type = other RNA
tttcttggatttatcaaaatgag

SEQ ID NO: 578 - RNA, 23 nt, synthetic construct
  source 1..23: mol_type = other RNA
tagaggatatttcttggatttat

SEQ ID NO: 579 - RNA, 23 nt, synthetic construct
  source 1..23: mol_type = other RNA
taatagtagaggatatttcttgg

SEQ ID NO: 580 - RNA, 23 nt, synthetic construct
  source 1..23: mol_type = other RNA
catacacatctaatagtagagga

SEQ ID NO: 581 - RNA, 23 nt, synthetic construct
  source 1..23: mol_type = other RNA
ttcagtctgaagacagtgtctgc

SEQ ID NO: 582 - RNA, 23 nt, synthetic construct
  source 1..23: mol_type = other RNA
gcccagttcagtctgaagacagt

SEQ ID NO: 583 - RNA, 23 nt, synthetic construct
  source 1..23: mol_type = other RNA
gtaagtggcccagttcagtctga

SEQ ID NO: 584 - RNA, 23 nt, synthetic construct
  source 1..23: mol_type = other RNA
ctgtgcttgcaaggtaagtggcc

SEQ ID NO: 585 - RNA, 23 nt, synthetic construct
  source 1..23: mol_type = other RNA
taatgttttctgtgcttgcaagg

SEQ ID NO: 586 - RNA, 23 nt, synthetic construct
  source 1..23: mol_type = other RNA
gctactataatgttttctgtgct

SEQ ID NO: 587 - RNA, 23 nt, synthetic construct
  source 1..23: mol_type = other RNA
caaagctagctactataatgttt

SEQ ID NO: 588 - RNA, 23 nt, synthetic construct
  source 1..23: mol_type = other RNA
tctgccatcaaagctagctacta

SEQ ID NO: 589 - RNA, 23 nt, synthetic construct
  source 1..23: mol_type = other RNA
cacttcctctgccatcaaagcta

SEQ ID NO: 590 - RNA, 23 nt, synthetic construct
  source 1..23: mol_type = other RNA
cttggtaaccacttcctctgcca

SEQ ID NO: 591 - RNA, 23 nt, synthetic construct
  source 1..23: mol_type = other RNA
gatcttatctccttggtaaccac

SEQ ID NO: 592 - RNA, 23 nt, synthetic construct
  source 1..23: mol_type = other RNA
catgcatgatcttatctccttgg

SEQ ID NO: 593 - RNA, 23 nt, synthetic construct
  source 1..23: mol_type = other RNA
gttgattgcatgcatgatcttat

SEQ ID NO: 594 - RNA, 23 nt, synthetic construct
  source 1..23: mol_type = other RNA
cagtcttctgttgattgcatgca

SEQ ID NO: 595 - RNA, 23 nt, synthetic construct
  source 1..23: mol_type = other RNA
caaatgttcccagtcttctgttg

SEQ ID NO: 596 - RNA, 23 nt, synthetic construct
  source 1..23: mol_type = other RNA
tcaacttcaaatgttcccagtct

SEQ ID NO: 597 - RNA, 23 nt, synthetic construct
  source 1..23: mol_type = other RNA
tgatcttcaacttcaaatgttcc

SEQ ID NO: 598 - RNA, 23 nt, synthetic construct
  source 1..23: mol_type = other RNA
tcaatttgatcttcaacttcaaa

SEQ ID NO: 599 - RNA, 23 nt, synthetic construct
  source 1..23: mol_type = other RNA
gctgcttcaatttgatcttcaac

SEQ ID NO: 600 - RNA, 23 nt, synthetic construct
  source 1..23: mol_type = other RNA
attgtctggctgcttcaatttga

SEQ ID NO: 601 - RNA, 23 nt, synthetic construct
  source 1..23: mol_type = other RNA
ttttgaaaattgtctggctgctt

SEQ ID NO: 602 - RNA, 23 nt, synthetic construct
  source 1..23: mol_type = other RNA
cgtttgttgtccacaaatcccat

SEQ ID NO: 603 - RNA, 23 nt, synthetic construct
  source 1..23: mol_type = other RNA
gcaattcgtttgttgtccacaaa

SEQ ID NO: 604 - RNA, 23 nt, synthetic construct
  source 1..23: mol_type = other RNA
ccaaattgcaattcgtttgttgt

SEQ ID NO: 605 - RNA, 23 nt, synthetic construct
  source 1..23: mol_type = other RNA
ttacgtaccctccatatgaccag

SEQ ID NO: 606 - RNA, 23 nt, synthetic construct
  source 1..23: mol_type = other RNA
gaccattgaggttacgtaccctc

SEQ ID NO: 607 - RNA, 23 nt, synthetic construct
  source 1..23: mol_type = other RNA
ttgaacacgccacttcccgatcc

SEQ ID NO: 608 - RNA, 23 nt, synthetic construct
  source 1..23: mol_type = other RNA
attccacacttgaacacgccact

SEQ ID NO: 609 - RNA, 23 nt, synthetic construct
  source 1..23: mol_type = other RNA
cacggctattccacacttgaaca

SEQ ID NO: 610 - RNA, 23 nt, synthetic construct
  source 1..23: mol_type = other RNA
cactgagtcatagtactcccacc

SEQ ID NO: 611 - RNA, 23 nt, synthetic construct
  source 1..23: mol_type = other RNA
gttctgtgtacactgagtcatag

SEQ ID NO: 612 - RNA, 23 nt, synthetic construct
  source 1..23: mol_type = other RNA
catgtaacgttctgtgtacactg

SEQ ID NO: 613 - RNA, 23 nt, synthetic construct
  source 1..23: mol_type = other RNA
gagacccatgtaacgttctgtgt

SEQ ID NO: 614 - RNA, 23 nt, synthetic construct
  source 1..23: mol_type = other RNA
gagttgggagacccatgtaacgt

SEQ ID NO: 615 - RNA, 23 nt, synthetic construct
  source 1..23: mol_type = other RNA
gtcttctggagttgggagaccca

SEQ ID NO: 616 - RNA, 23 nt, synthetic construct
  source 1..23: mol_type = other RNA
caaggttgtcttctggagttggg

SEQ ID NO: 617 - RNA, 23 nt, synthetic construct
  source 1..23: mol_type = other RNA
tctgtaatggtcaaggttgtctt

SEQ ID NO: 618 - RNA, 23 nt, synthetic construct
  source 1..23: mol_type = other RNA
tgaatttctgtaatggtcaaggt

SEQ ID NO: 619 - RNA, 23 nt, synthetic construct
  source 1..23: mol_type = other RNA
tgactgttgaatttctgtaatgg

SEQ ID NO: 620 - RNA, 23 nt, synthetic construct
  source 1..23: mol_type = other RNA
tgctcatgactgttgaatttctg

SEQ ID NO: 621 - RNA, 23 nt, synthetic construct
  source 1..23: mol_type = other RNA
aattttcagctctgctcatgact

SEQ ID NO: 622 - RNA, 23 nt, synthetic construct
  source 1..23: mol_type = other RNA
gtttaaaattttcagctctgctc

SEQ ID NO: 623 - RNA, 23 nt, synthetic construct
  source 1..23: mol_type = other RNA
gaggtactcaacttgtttaaaat

SEQ ID NO: 624 - RNA, 23 nt, synthetic construct
  source 1..23: mol_type = other RNA
tgaataaggaggtactcaacttg

SEQ ID NO: 625 - RNA, 23 nt, synthetic construct
  source 1..23: mol_type = other RNA
tgttccatgaataaggaggtact

SEQ ID NO: 626 - RNA, 23 nt, synthetic construct
  source 1..23: mol_type = other RNA
catctgctgttccatgaataagg

SEQ ID NO: 627 - RNA, 23 nt, synthetic construct
  source 1..23: mol_type = other RNA
gaacgttatcatctgctgttcca

SEQ ID NO: 628 - RNA, 23 nt, synthetic construct
  source 1..23: mol_type = other RNA
gaaagtgaacgttatcatctgct

SEQ ID NO: 629 - RNA, 23 nt, synthetic construct
  source 1..23: mol_type = other RNA
gactgctgaaagtgaacgttatc

SEQ ID NO: 630 - RNA, 23 nt, synthetic construct
  source 1..23: mol_type = other RNA
tgagctgactgctgaaagtgaac

SEQ ID NO: 631 - RNA, 23 nt, synthetic construct
  source 1..23: mol_type = other RNA
ttggagatctgagctgactgctg

SEQ ID NO: 632 - RNA, 23 nt, synthetic construct
  source 1..23: mol_type = other RNA
cagggctttggagatctgagctg

SEQ ID NO: 633 - RNA, 23 nt, synthetic construct
  source 1..23: mol_type = other RNA
catcgaccagggctttggagatc

SEQ ID NO: 634 - RNA, 23 nt, synthetic construct
  source 1..23: mol_type = other RNA
cactccaacatcgaccagggctt

SEQ ID NO: 635 - RNA, 23 nt, synthetic construct
  source 1..23: mol_type = other RNA
gaaatccactccaacatcgacca

SEQ ID NO: 636 - RNA, 23 nt, synthetic construct
  source 1..23: mol_type = other RNA
cacattgcctggaaatccactcc

SEQ ID NO: 637 - RNA, 23 nt, synthetic construct
  source 1..23: mol_type = other RNA
cagtataccacattgcctggaaa

SEQ ID NO: 638 - RNA, 23 nt, synthetic construct
  source 1..23: mol_type = other RNA
tcttcatcagtataccacattgc

SEQ ID NO: 639 - RNA, 23 nt, synthetic construct
  source 1..23: mol_type = other RNA
ccatggtcttcatcagtatacca

SEQ ID NO: 640 - RNA, 23 nt, synthetic construct
  source 1..23: mol_type = other RNA
tagctattccatggtcttcatca

SEQ ID NO: 641 - RNA, 23 nt, synthetic construct
  source 1..23: mol_type = other RNA
gtgctgctagctattccatggtc

SEQ ID NO: 642 - RNA, 23 nt, synthetic construct
  source 1..23: mol_type = other RNA
gtgtgctgtgctgctagctattc

SEQ ID NO: 643 - RNA, 23 nt, synthetic construct
  source 1..23: mol_type = other RNA
atatgttggtgtgctgtgctgct

SEQ ID NO: 644 - RNA, 23 nt, synthetic construct
  source 1..23: mol_type = other RNA
gtatatatatgttggtgtgctgt

SEQ ID NO: 645 - RNA, 23 nt, synthetic construct
  source 1..23: mol_type = other RNA
atgtgggtatatatatgttggtg

SEQ ID NO: 646 - RNA, 23 nt, synthetic construct
  source 1..23: mol_type = other RNA
atgaagtggctcatgtgggtata

SEQ ID NO: 647 - RNA, 23 nt, synthetic construct
  source 1..23: mol_type = other RNA
tgttttatgaagtggctcatgtg

SEQ ID NO: 648 - RNA, 23 nt, synthetic construct
  source 1..23: mol_type = other RNA
aaacattgttttatgaagtggct

SEQ ID NO: 649 - RNA, 23 nt, synthetic construct
  source 1..23: mol_type = other RNA
aaggtaaagagaaacattgtttt

SEQ ID NO: 650 - RNA, 23 nt, synthetic construct
  source 1..23: mol_type = other RNA
ggtgctaaggtaaagagaaacat

SEQ ID NO: 651 - RNA, 23 nt, synthetic construct
  source 1..23: mol_type = other RNA
attttgaggtgctaaggtaaaga

SEQ ID NO: 652 - RNA, 23 nt, synthetic construct
  source 1..23: mol_type = other RNA
catggtattttgaggtgctaagg

SEQ ID NO: 653 - RNA, 23 nt, synthetic construct
  source 1..23: mol_type = other RNA
taaatggcatggtattttgaggt

SEQ ID NO: 654 - RNA, 23 nt, synthetic construct
  source 1..23: mol_type = other RNA
taagctttaaatggcatggtatt

SEQ ID NO: 655 - RNA, 23 nt, synthetic construct
  source 1..23: mol_type = other RNA
gcagttttgagataatgaaaaca

SEQ ID NO: 656 - RNA, 23 nt, synthetic construct
  source 1..23: mol_type = other RNA
cttgacagtgcagttttgagata

SEQ ID NO: 657 - RNA, 23 nt, synthetic construct
  source 1..23: mol_type = other RNA
atcatcatcttgacagtgcagtt

SEQ ID NO: 658 - RNA, 23 nt, synthetic construct
  source 1..23: mol_type = other RNA
ttaaagatcatcatcatcttgac

SEQ ID NO: 659 - RNA, 23 nt, synthetic construct
  source 1..23: mol_type = other RNA
tgagtgtgtattttaaagatcat

SEQ ID NO: 660 - RNA, 23 nt, synthetic construct
  source 1..23: mol_type = other RNA
tcttgatttgagtgtgtatttta

SEQ ID NO: 661 - RNA, 23 nt, synthetic construct
  source 1..23: mol_type = other RNA
cttaagtttcttgatttgagtgt

SEQ ID NO: 662 - RNA, 23 nt, synthetic construct
  source 1..23: mol_type = other RNA
ggtaaccttaagtttcttgattt

SEQ ID NO: 663 - RNA, 23 nt, synthetic construct
  source 1..23: mol_type = other RNA
ggaacaaaggtaaccttaagttt

SEQ ID NO: 664 - RNA, 23 nt, synthetic construct
  source 1..23: mol_type = other RNA
atgaaatttgggaacaaaggtaa

SEQ ID NO: 665 - RNA, 23 nt, synthetic construct
  source 1..23: mol_type = other RNA
ataggtatgaaatttgggaacaa

SEQ ID NO: 666 - RNA, 23 nt, synthetic construct
  source 1..23: mol_type = other RNA
aagatgataggtatgaaatttgg

SEQ ID NO: 667 - RNA, 23 nt, synthetic construct
  source 1..23: mol_type = other RNA
cctacttaagatgataggtatga

SEQ ID NO: 668 - RNA, 23 nt, synthetic construct
  source 1..23: mol_type = other RNA
cagaagtccctacttaagatgat

SEQ ID NO: 669 - RNA, 23 nt, synthetic construct
  source 1..23: mol_type = other RNA
gttgtgaagacagaagtccctac

SEQ ID NO: 670 - RNA, 23 nt, synthetic construct
  source 1..23: mol_type = other RNA
taataatctgttgtgaagacaga

SEQ ID NO: 671 - RNA, 23 nt, synthetic construct
  source 1..23: mol_type = other RNA
tgtaaggtaataatctgttgtga

SEQ ID NO: 672 - RNA, 23 nt, synthetic construct
  source 1..23: mol_type = other RNA
aaacttctgtaaggtaataatct

SEQ ID NO: 673 - RNA, 23 nt, synthetic construct
  source 1..23: mol_type = other RNA
taattcaaacttctgtaaggtaa

SEQ ID NO: 674 - RNA, 23 nt, synthetic construct
  source 1..23: mol_type = other RNA
gaccggataattcaaacttctgt

SEQ ID NO: 675 - RNA, 23 nt, synthetic construct
  source 1..23: mol_type = other RNA
aaacccgaccggataattcaaac

SEQ ID NO: 676 - RNA, 23 nt, synthetic construct
  source 1..23: mol_type = other RNA
aacaataaaacccgaccggataa

SEQ ID NO: 677 - RNA, 23 nt, synthetic construct
  source 1..23: mol_type = other RNA
attttaaacaataaaacccgacc

SEQ ID NO: 678 - RNA, 23 nt, synthetic construct
  source 1..23: mol_type = other RNA
tgatgcagaaatgattttaaaca

SEQ ID NO: 679 - RNA, 23 nt, synthetic construct
  source 1..23: mol_type = other RNA
cagcagctgatgcagaaatgatt

SEQ ID NO: 680 - RNA, 23 nt, synthetic construct
  source 1..23: mol_type = other RNA
ttgtttcagcagctgatgcagaa

SEQ ID NO: 681 - RNA, 23 nt, synthetic construct
  source 1..23: mol_type = other RNA
tatttgttgtttcagcagctgat

SEQ ID NO: 682 - RNA, 23 nt, synthetic construct
  source 1..23: mol_type = other RNA
aacaattcctatttgttgtttca

SEQ ID NO: 683 - RNA, 23 nt, synthetic construct
  source 1..23: mol_type = other RNA
gcctccataaaaacaattcctat

SEQ ID NO: 684 - RNA, 23 nt, synthetic construct
  source 1..23: mol_type = other RNA
atgcaaagcctccataaaaacaa

SEQ ID NO: 685 - RNA, 23 nt, synthetic construct
  source 1..23: mol_type = other RNA
cagggaatctatgcaaagcctcc

SEQ ID NO: 686 - RNA, 23 nt, synthetic construct
  source 1..23: mol_type = other RNA
cctgctcagggaatctatgcaaa

SEQ ID NO: 687 - RNA, 23 nt, synthetic construct
  source 1..23: mol_type = other RNA
ttaaaatcctgctcagggaatct

SEQ ID NO: 688 - RNA, 23 nt, synthetic construct
  source 1..23: mol_type = other RNA
aaaagattaaaatcctgctcagg

SEQ ID NO: 689 - RNA, 23 nt, synthetic construct
  source 1..23: mol_type = other RNA
agtccagttagaaaaagattaaa

SEQ ID NO: 690 - RNA, 23 nt, synthetic construct
  source 1..23: mol_type = other RNA
atttgaaccagtccagttagaaa

SEQ ID NO: 691 - RNA, 23 nt, synthetic construct
  source 1..23: mol_type = other RNA
gaacaacatttgaaccagtccag

SEQ ID NO: 692 - RNA, 23 nt, synthetic construct
  source 1..23: mol_type = other RNA
ttaaagaagagaacaacatttga

SEQ ID NO: 693 - RNA, 23 nt, synthetic construct
  source 1..23: mol_type = other RNA
ccatccctttaaagaagagaaca

SEQ ID NO: 694 - RNA, 23 nt, synthetic construct
  source 1..23: mol_type = other RNA
catcttgccatccctttaaagaa

SEQ ID NO: 695 - RNA, 23 nt, synthetic construct
  source 1..23: mol_type = other RNA
catcactgcccacatcttgccat

SEQ ID NO: 696 - RNA, 23 nt, synthetic construct
  source 1..23: mol_type = other RNA
ccctagtgacatcactgcccaca

SEQ ID NO: 697 - RNA, 23 nt, synthetic construct
  source 1..23: mol_type = other RNA
taatccctcttatcctgtccctg

SEQ ID NO: 698 - RNA, 23 nt, synthetic construct
  source 1..23: mol_type = other RNA
tctccctaatccctcttatcctg

SEQ ID NO: 699 - RNA, 23 nt, synthetic construct
  source 1..23: mol_type = other RNA
tatcttctctccctaatccctct

SEQ ID NO: 700 - RNA, 23 nt, synthetic construct
  source 1..23: mol_type = other RNA
ccctgctatcttctctccctaat

SEQ ID NO: 701 - RNA, 23 nt, synthetic construct
  source 1..23: mol_type = other RNA
tgcttggacttgggttcccagcc

SEQ ID NO: 702 - RNA, 23 nt, synthetic construct
  source 1..23: mol_type = other RNA
ttggtatgcttggacttgggttc

SEQ ID NO: 703 - RNA, 23 nt, synthetic construct
  source 1..23: mol_type = other RNA
ctcgtgttggtatgcttggactt

SEQ ID NO: 704 - RNA, 23 nt, synthetic construct
  source 1..23: mol_type = other RNA
gacagtagcctgctcgtgttggt

SEQ ID NO: 705 - RNA, 23 nt, synthetic construct
  source 1..23: mol_type = other RNA
ggagctgacagtagcctgctcgt

SEQ ID NO: 706 - RNA, 23 nt, synthetic construct
  source 1..23: mol_type = other RNA
gctgtgaacagctcttctccgag

SEQ ID NO: 707 - RNA, 23 nt, synthetic construct
  source 1..23: mol_type = other RNA
cagtctggctgtgaacagctctt

SEQ ID NO: 708 - RNA, 23 nt, synthetic construct
  source 1..23: mol_type = other RNA
aaactgtgccagtctggctgtga

SEQ ID NO: 709 - RNA, 23 nt, synthetic construct
  source 1..23: mol_type = other RNA
ctttctcagaaaactgtgccagt

SEQ ID NO: 710 - RNA, 23 nt, synthetic construct
  source 1..23: mol_type = other RNA
aatagtctttctcagaaaactgt

SEQ ID NO: 711 - RNA, 23 nt, synthetic construct
  source 1..23: mol_type = other RNA
tgtttgaatagtctttctcagaa

SEQ ID NO: 712 - RNA, 23 nt, synthetic construct
  source 1..23: mol_type = other RNA
tgagactgtttgaatagtctttc

SEQ ID NO: 713 - RNA, 23 nt, synthetic construct
  source 1..23: mol_type = other RNA
gatttcctgagactgtttgaata

SEQ ID NO: 714 - RNA, 23 nt, synthetic construct
  source 1..23: mol_type = other RNA
gcatatttgatttcctgagactg

SEQ ID NO: 715 - RNA, 23 nt, synthetic construct
  source 1..23: mol_type = other RNA
tgctttgcatatttgatttcctg

SEQ ID NO: 716 - RNA, 23 nt, synthetic construct
  source 1..23: mol_type = other RNA
agtcagtgctttgcatatttgat

SEQ ID NO: 717 - RNA, 23 nt, synthetic construct
  source 1..23: mol_type = other RNA
cttagaagtcagtgctttgcata

SEQ ID NO: 718 - RNA, 23 nt, synthetic construct
  source 1..23: mol_type = other RNA
gttttacttagaagtcagtgctt

SEQ ID NO: 719 - RNA, 23 nt, synthetic construct
  source 1..23: mol_type = other RNA
gctgtggttttacttagaagtca

SEQ ID NO: 720 - RNA, 23 nt, synthetic construct
  source 1..23: mol_type = other RNA
tttcaactgctgtggttttactt

SEQ ID NO: 721 - RNA, 23 nt, synthetic construct
  source 1..23: mol_type = other RNA
gagtcttttcaactgctgtggtt

SEQ ID NO: 722 - RNA, 23 nt, synthetic construct
  source 1..23: mol_type = other RNA
atttctttggagtcttttcaact

SEQ ID NO: 723 - RNA, 23 nt, synthetic construct
  source 1..23: mol_type = other RNA
ccttacatttctttggagtcttt

SEQ ID NO: 724 - RNA, 23 nt, synthetic construct
  source 1..23: mol_type = other RNA
cagtttcccttacatttctttgg

SEQ ID NO: 725 - RNA, 23 nt, synthetic construct
  source 1..23: mol_type = other RNA
gcgttgctggcagtttcccttac

SEQ ID NO: 726 - RNA, 23 nt, synthetic construct
  source 1..23: mol_type = other RNA
acctatagccataactggcacct

SEQ ID NO: 727 - RNA, 23 nt, synthetic construct
  source 1..23: mol_type = other RNA
ttttgtagcacctatagccataa

SEQ ID NO: 728 - RNA, 23 nt, synthetic construct
  source 1..23: mol_type = other RNA
ctttcccatcacccttgctgtgt

SEQ ID NO: 729 - RNA, 23 nt, synthetic construct
  source 1..23: mol_type = other RNA
tacaatgctttcccatcaccctt

SEQ ID NO: 730 - RNA, 23 nt, synthetic construct
  source 1..23: mol_type = other RNA
cacatttacaatgctttcccatc

SEQ ID NO: 731 - RNA, 23 nt, synthetic construct
  source 1..23: mol_type = other RNA
taaaagcacatttacaatgcttt

SEQ ID NO: 732 - RNA, 23 nt, synthetic construct
  source 1..23: mol_type = other RNA
tctttcactaggaacatcagtat

SEQ ID NO: 733 - RNA, 23 nt, synthetic construct
  source 1..23: mol_type = other RNA
gctgcctctttcactaggaacat

SEQ ID NO: 734 - RNA, 23 nt, synthetic construct
  source 1..23: mol_type = other RNA
gtttcaagctgcctctttcacta

SEQ ID NO: 735 - RNA, 23 nt, synthetic construct
  source 1..23: mol_type = other RNA
catctcagtttcaagctgcctct

SEQ ID NO: 736 - RNA, 23 nt, synthetic construct
  source 1..23: mol_type = other RNA
gatgtgttcacatctcagtttca

SEQ ID NO: 737 - RNA, 23 nt, synthetic construct
  source 1..23: mol_type = other RNA
caagctgatgtgttcacatctca

SEQ ID NO: 738 - RNA, 23 nt, synthetic construct
  source 1..23: mol_type = other RNA
ttttaacagggcaagctgatgtg

SEQ ID NO: 739 - RNA, 23 nt, synthetic construct
  source 1..23: mol_type = other RNA
ttcatcttttaacagggcaagct

SEQ ID NO: 740 - RNA, 23 nt, synthetic construct
  source 1..23: mol_type = other RNA
tcaagttaagatttgtgatacaa

SEQ ID NO: 741 - RNA, 23 nt, synthetic construct
  source 1..23: mol_type = other RNA
gactccttcaagttaagatttgt

SEQ ID NO: 742 - RNA, 23 nt, synthetic construct
  source 1..23: mol_type = other RNA
atgcaaggactccttcaagttaa

SEQ ID NO: 743 - RNA, 23 nt, synthetic construct
  source 1..23: mol_type = other RNA
aaattgatgcaaggactccttca

SEQ ID NO: 744 - RNA, 23 nt, synthetic construct
  source 1..23: mol_type = other RNA
taagaaaaattgatgcaaggact

SEQ ID NO: 745 - RNA, 23 nt, synthetic construct
  source 1..23: mol_type = other RNA
acactcaaagaaatgaaataaga

SEQ ID NO: 746 - RNA, 23 nt, synthetic construct
  source 1..23: mol_type = other RNA
aattaagacactcaaagaaatga

SEQ ID NO: 747 - RNA, 23 nt, synthetic construct
  source 1..23: mol_type = other RNA
tcttttaattaagacactcaaag

SEQ ID NO: 748 - RNA, 23 nt, synthetic construct
  source 1..23: mol_type = other RNA
tccaaggaagttaaaatattctt

SEQ ID NO: 749 - RNA, 23 nt, synthetic construct
  source 1..23: mol_type = other RNA
aatgagtccaaggaagttaaaat

SEQ ID NO: 750 - RNA, 23 nt, synthetic construct
  source 1..23: mol_type = other RNA
ttttaaaatgagtccaaggaagt

SEQ ID NO: 751 - RNA, 23 nt, synthetic construct
  source 1..23: mol_type = other RNA
tgtagaatgggaataataataca

SEQ ID NO: 752 - RNA, 23 nt, synthetic construct
  source 1..23: mol_type = other RNA
catagtatgtagaatgggaataa

SEQ ID NO: 753 - RNA, 23 nt, synthetic construct
  source 1..23: mol_type = other RNA
gagaaattccatagtatgtagaa

SEQ ID NO: 754 - RNA, 23 nt, synthetic construct
  source 1..23: mol_type = other RNA
aaatgactgggagaaattccata

SEQ ID NO: 755 - RNA, 23 nt, synthetic construct
  source 1..23: mol_type = other RNA
cacatttattaaatgactgggag

SEQ ID NO: 756 - RNA, 23 nt, synthetic construct
  source 1..23: mol_type = other RNA
tgaaggcacatttattaaatgac

SEQ ID NO: 757 - RNA, 21 nt, synthetic construct
  source 1..21: mol_type = other RNA
  modified_base 1: mod_base = OTHER; note = 2'-O-methylguanosine-3'-phosphorothioate
  modified_base 2: mod_base = OTHER; note = 2'-O-methylcytidine-3'-phosphorothioate
  modified_base 3: mod_base = OTHER; note = 2'-O-methylguanosine-3'-phosphate
  modified_base 4: mod_base = OTHER; note = 2'-O-methylcytidine-3'-phosphate
  modified_base 5: mod_base = OTHER; note = 2'-O-methyluridine-3'-phosphate
  modified_base 6: mod_base = OTHER; note = 2'-O-methylcytidine-3'-phosphate
  modified_base 7: mod_base = OTHER; note = 2'-deoxy-2'-fluoroadenosine-3'-phosphate
  modified_base 8: mod_base = OTHER; note = 2'-O-methylcytidine-3'-phosphate
  modified_base 9: mod_base = OTHER; note = 2'-deoxy-2'-fluorouridine-3'-phosphate
  modified_base 10: mod_base = OTHER; note = 2'-deoxy-2'-fluoroadenosine-3'-phosphate
  modified_base 11: mod_base = OTHER; note = 2'-deoxy-2'-fluoroadenosine-3'-phosphate
  modified_base 12: mod_base = OTHER; note = 2'-O-methyluridine-3'-phosphate
  modified_base 13: mod_base = OTHER; note = 2'-O-methylguanosine-3'-phosphate
  modified_base 14: mod_base = OTHER; note = 2'-O-methyluridine-3'-phosphate
  modified_base 15: mod_base = OTHER; note = 2'-O-methyluridine-3'-phosphate
  modified_base 16: mod_base = OTHER; note = 2'-O-methyluridine-3'-phosphate
  modified_base 17: mod_base = OTHER; note = 2'-O-methyladenosine-3'-phosphate
  modified_base 18: mod_base = OTHER; note = 2'-O-methyladenosine-3'-phosphate
  modified_base 19: mod_base = OTHER; note = 2'-O-methylcytidine-3'-phosphate
  modified_base 20: mod_base = OTHER; note = 2'-O-methyluridine-3'-phosphate
  modified_base 21: mod_base = OTHER; note = 2'-O-methyluridine-3'-phosphate ((2S,4R)-1-[29-[[2-(acetylamino)-2-deoxy-beta-D-galactopyra nosyl]oxy]-14,14-bis[[3-[[3-[[5-[[2-(acetylamino)-2-deoxy-b eta-D-galactopyranosyl]oxy]-1-oxopentyl]amino]propyl]amino] -3-oxopropoxy]methyl]-1,12,19,25-tetraoxo-16-oxa-13,20,24-t riazanonacos-1-yl]-4-hydroxy-2-pyrrolidinyl)methyl ester
gcgctcactaatgtttaactt

SEQ ID NO: 758 - RNA, 21 nt, synthetic construct
  source 1..21: mol_type = other RNA
  modified_base 1: mod_base = OTHER; note = 2'-O-methylcytidine-3'-phosphorothioate
  modified_base 2: mod_base = OTHER; note = 2'-O-methyluridine-3'-phosphorothioate
  modified_base 3: mod_base = OTHER; note = 2'-O-methyluridine-3'-phosphate
  modified_base 4: mod_base = OTHER; note = 2'-O-methylguanosine-3'-phosphate
  modified_base 5: mod_base = OTHER; note = 2'-O-methylcytidine-3'-phosphate
  modified_base 6: mod_base = OTHER; note = 2'-O-methylcytidine-3'-phosphate
  modified_base 7: mod_base = OTHER; note = 2'-deoxy-2'-fluoroadenosine-3'-phosphate
  modified_base 8: mod_base = OTHER; note = 2'-O-methylguanosine-3'-phosphate
  modified_base 9: mod_base = OTHER; note = 2'-deoxy-2'-fluorocytidine-3'-phosphate
  modified_base 10: mod_base = OTHER; note = 2'-deoxy-2'-fluoroguanosine-3'-phosphate
  modified_base 11: mod_base = OTHER; note = 2'-deoxy-2'-fluoroguanosine-3'-phosphate
  modified_base 12: mod_base = OTHER; note = 2'-O-methylcytidine-3'-phosphate
  modified_base 13: mod_base = OTHER; note = 2'-O-methylguanosine-3'-phosphate
  modified_base 14: mod_base = OTHER; note = 2'-O-methyladenosine-3'-phosphate
  modified_base 15: mod_base = OTHER; note = 2'-O-methylguanosine-3'-phosphate
  modified_base 16: mod_base = OTHER; note = 2'-O-methyluridine-3'-phosphate
  modified_base 17: mod_base = OTHER; note = 2'-O-methylguanosine-3'-phosphate
  modified_base 18: mod_base = OTHER; note = 2'-O-methyladenosine-3'-phosphate
  modified_base 19: mod_base = OTHER; note = 2'-O-methylcytidine-3'-phosphate
  modified_base 20: mod_base = OTHER; note = 2'-O-methyluridine-3'-phosphate
  modified_base 21: mod_base = OTHER; note = 2'-O-methyluridine-3'-phosphate ((2S,4R)-1-[29-[[2-(acetylamino)-2-deoxy-beta-D-galactopyra nosyl]oxy]-14,14-bis[[3-[[3-[[5-[[2-(acetylamino)-2-deoxy-b eta-D-galactopyranosyl]oxy]-1-oxopentyl]amino]propyl]amino] -3-oxopropoxy]methyl]-1,12,19,25-tetraoxo-16-oxa-13,20,24-t riazanonacos-1-yl]-4-hydroxy-2-pyrrolidinyl)methyl ester
cttgccagcggcgagtgactt

SEQ ID NO: 759 - RNA, 21 nt, synthetic construct
  source 1..21: mol_type = other RNA
  modified_base 1: mod_base = OTHER; note = 2'-O-methyluridine-3'-phosphorothioate
  modified_base 2: mod_base = OTHER; note = 2'-O-methyluridine-3'-phosphorothioate
  modified_base 3: mod_base = OTHER; note = 2'-O-methylcytidine-3'-phosphate
  modified_base 4: mod_base = OTHER; note = 2'-O-methyluridine-3'-phosphate
  modified_base 5: mod_base = OTHER; note = 2'-O-methylguanosine-3'-phosphate
  modified_base 6: mod_base = OTHER; note = 2'-O-methylcytidine-3'-phosphate
  modified_base 7: mod_base = OTHER; note = 2'-deoxy-2'-fluorocytidine-3'-phosphate
  modified_base 8: mod_base = OTHER; note = 2'-O-methyluridine-3'-phosphate
  modified_base 9: mod_base = OTHER; note = 2'-deoxy-2'-fluoroguanosine-3'-phosphate
  modified_base 10: mod_base = OTHER; note = 2'-deoxy-2'-fluorocytidine-3'-phosphate
  modified_base 11: mod_base = OTHER; note = 2'-deoxy-2'-fluoroguanosine-3'-phosphate
  modified_base 12: mod_base = OTHER; note = 2'-O-methylcytidine-3'-phosphate
  modified_base 13: mod_base = OTHER; note = 2'-O-methyluridine-3'-phosphate
  modified_base 14: mod_base = OTHER; note = 2'-O-methylcytidine-3'-phosphate
  modified_base 15: mod_base = OTHER; note = 2'-O-methylcytidine-3'-phosphate
  modified_base 16: mod_base = OTHER; note = 2'-O-methyluridine-3'-phosphate
  modified_base 17: mod_base = OTHER; note = 2'-O-methyluridine-3'-phosphate
  modified_base 18: mod_base = OTHER; note = 2'-O-methylcytidine-3'-phosphate
  modified_base 19: mod_base = OTHER; note = 2'-O-methyluridine-3'-phosphate
  modified_base 20: mod_base = OTHER; note = 2'-O-methylcytidine-3'-phosphate
  modified_base 21: mod_base = OTHER; note = 2'-O-methyluridine-3'-phosphate ((2S,4R)-1-[29-[[2-(acetylamino)-2-deoxy-beta-D-galactopyra nosyl]oxy]-14,14-bis[[3-[[3-[[5-[[2-(acetylamino)-2-deoxy-b eta-D-galactopyranosyl]oxy]-1-oxopentyl]amino]propyl]amino] -3-oxopropoxy]methyl]-1,12,19,25-tetraoxo-16-oxa-13,20,24-t riazanonacos-1-yl]-4-hydroxy-2-pyrrolidinyl)methyl ester
ttctgcctgcgctccttctct

SEQ ID NO: 760 - RNA, 21 nt, synthetic construct
  source 1..21: mol_type = other RNA
  modified_base 1: mod_base = OTHER; note = 2'-O-methylguanosine-3'-phosphorothioate
  modified_base 2: mod_base = OTHER; note = 2'-O-methylcytidine-3'-phosphorothioate
  modified_base 3: mod_base = OTHER; note = 2'-O-methylguanosine-3'-phosphate
  modified_base 4: mod_base = OTHER; note = 2'-O-methylcytidine-3'-phosphate
  modified_base 5: mod_base = OTHER; note = 2'-O-methyluridine-3'-phosphate
  modified_base 6: mod_base = OTHER; note = 2'-O-methylcytidine-3'-phosphate
  modified_base 7: mod_base = OTHER; note = 2'-deoxy-2'-fluorocytidine-3'-phosphate
  modified_base 8: mod_base = OTHER; note = 2'-O-methyluridine-3'-phosphate
  modified_base 9: mod_base = OTHER; note = 2'-deoxy-2'-fluorouridine-3'-phosphate
  modified_base 10: mod_base = OTHER; note = 2'-deoxy-2'-fluorocytidine-3'-phosphate
  modified_base 11: mod_base = OTHER; note = 2'-deoxy-2'-fluorouridine-3'-phosphate
  modified_base 12: mod_base = OTHER; note = 2'-O-methylcytidine-3'-phosphate
  modified_base 13: mod_base = OTHER; note = 2'-O-methyluridine-3'-phosphate
  modified_base 14: mod_base = OTHER; note = 2'-O-methylguanosine-3'-phosphate
  modified_base 15: mod_base = OTHER; note = 2'-O-methyladenosine-3'-phosphate
  modified_base 16: mod_base = OTHER; note = 2'-O-methyladenosine-3'-phosphate
  modified_base 17: mod_base = OTHER; note = 2'-O-methylcytidine-3'-phosphate
  modified_base 18: mod_base = OTHER; note = 2'-O-methylguanosine-3'-phosphate
  modified_base 19: mod_base = OTHER; note = 2'-O-methylcytidine-3'-phosphate
  modified_base 20: mod_base = OTHER; note = 2'-O-methyluridine-3'-phosphate
  modified_base 21: mod_base = OTHER; note = 2'-O-methyluridine-3'-phosphate ((2S,4R)-1-[29-[[2-(acetylamino)-2-deoxy-beta-D-galactopyra nosyl]oxy]-14,14-bis[[3-[[3-[[5-[[2-(acetylamino)-2-deoxy-b eta-D-galactopyranosyl]oxy]-1-oxopentyl]amino]propyl]amino] -3-oxopropoxy]methyl]-1,12,19,25-tetraoxo-16-oxa-13,20,24-t riazanonacos-1-yl]-4-hydroxy-2-pyrrolidinyl)methyl ester
gcgctccttctctgaacgctt

SEQ ID NO: 761 - RNA, 21 nt, synthetic construct
  source 1..21: mol_type = other RNA
  modified_base 1: mod_base = OTHER; note = 2'-O-methylcytidine-3'-phosphorothioate
  modified_base 2: mod_base = OTHER; note = 2'-O-methyluridine-3'-phosphorothioate
  modified_base 3: mod_base = OTHER; note = 2'-O-methyluridine-3'-phosphate
  modified_base 4: mod_base = OTHER; note = 2'-O-methylcytidine-3'-phosphate
  modified_base 5: mod_base = OTHER; note = 2'-O-methyluridine-3'-phosphate
  modified_base 6: mod_base = OTHER; note = 2'-O-methylcytidine-3'-phosphate
  modified_base 7: mod_base = OTHER; note = 2'-deoxy-2'-fluorouridine-3'-phosphate
  modified_base 8: mod_base = OTHER; note = 2'-O-methylguanosine-3'-phosphate
  modified_base 9: mod_base = OTHER; note = 2'-deoxy-2'-fluoroadenosine-3'-phosphate
  modified_base 10: mod_base = OTHER; note = 2'-deoxy-2'-fluoroadenosine-3'-phosphate
  modified_base 11: mod_base = OTHER; note = 2'-deoxy-2'-fluorocytidine-3'-phosphate
  modified_base 12: mod_base = OTHER; note = 2'-O-methylguanosine-3'-phosphate
  modified_base 13: mod_base = OTHER; note = 2'-O-methylcytidine-3'-phosphate
  modified_base 14: mod_base = OTHER; note = 2'-O-methyluridine-3'-phosphate
  modified_base 15: mod_base = OTHER; note = 2'-O-methylcytidine-3'-phosphate
  modified_base 16: mod_base = OTHER; note = 2'-O-methyladenosine-3'-phosphate
  modified_base 17: mod_base = OTHER; note = 2'-O-methylcytidine-3'-phosphate
  modified_base 18: mod_base = OTHER; note = 2'-O-methyluridine-3'-phosphate
  modified_base 19: mod_base = OTHER; note = 2'-O-methyluridine-3'-phosphate
  modified_base 20: mod_base = OTHER; note = 2'-O-methylcytidine-3'-phosphate
  modified_base 21: mod_base = OTHER; note = 2'-O-methyluridine-3'-phosphate ((2S,4R)-1-[29-[[2-(acetylamino)-2-deoxy-beta-D-galactopyra nosyl]oxy]-14,14-bis[[3-[[3-[[5-[[2-(acetylamino)-2-deoxy-b eta-D-galactopyranosyl]oxy]-1-oxopentyl]amino]propyl]amino] -3-oxopropoxy]methyl]-1,12,19,25-tetraoxo-16-oxa-13,20,24-t riazanonacos-1-yl]-4-hydroxy-2-pyrrolidinyl)methyl ester
cttctctgaacgctcacttct

SEQ ID NO: 762 - RNA, 21 nt, synthetic construct
  source 1..21: mol_type = other RNA
  modified_base 1: mod_base = OTHER; note = 2'-O-methyladenosine-3'-phosphorothioate
  modified_base 2: mod_base = OTHER; note = 2'-O-methylcytidine-3'-phosphorothioate
  modified_base 3: mod_base = OTHER; note = 2'-O-methylguanosine-3'-phosphate
  modified_base 4: mod_base = OTHER; note = 2'-O-methylcytidine-3'-phosphate
  modified_base 5: mod_base = OTHER; note = 2'-O-methyluridine-3'-phosphate
  modified_base 6: mod_base = OTHER; note = 2'-O-methylcytidine-3'-phosphate
  modified_base 7: mod_base = OTHER; note = 2'-deoxy-2'-fluoroadenosine-3'-phosphate
  modified_base 8: mod_base = OTHER; note = 2'-O-methylcytidine-3'-phosphate
  modified_base 9: mod_base = OTHER; note = 2'-deoxy-2'-fluorouridine-3'-phosphate
  modified_base 10: mod_base = OTHER; note = 2'-deoxy-2'-fluorouridine-3'-phosphate
  modified_base 11: mod_base = OTHER; note = 2'-deoxy-2'-fluorocytidine-3'-phosphate
  modified_base 12: mod_base = OTHER; note = 2'-O-methylcytidine-3'-phosphate
  modified_base 13: mod_base = OTHER; note = 2'-O-methylguanosine-3'-phosphate
  modified_base 14: mod_base = OTHER; note = 2'-O-methyladenosine-3'-phosphate
  modified_base 15: mod_base = OTHER; note = 2'-O-methylguanosine-3'-phosphate
  modified_base 16: mod_base = OTHER; note = 2'-O-methylguanosine-3'-phosphate
  modified_base 17: mod_base = OTHER; note = 2'-O-methyladenosine-3'-phosphate
  modified_base 18: mod_base = OTHER; note = 2'-O-methylguanosine-3'-phosphate
  modified_base 19: mod_base = OTHER; note = 2'-O-methyladenosine-3'-phosphate
  modified_base 20: mod_base = OTHER; note = 2'-O-methylcytidine-3'-phosphate
  modified_base 21: mod_base = OTHER; note = 2'-O-methyluridine-3'-phosphate ((2S,4R)-1-[29-[[2-(acetylamino)-2-deoxy-beta-D-galactopyra nosyl]oxy]-14,14-bis[[3-[[3-[[5-[[2-(acetylamino)-2-deoxy-b eta-D-galactopyranosyl]oxy]-1-oxopentyl]amino]propyl]amino] -3-oxopropoxy]methyl]-1,12,19,25-tetraoxo-16-oxa-13,20,24-t riazanonacos-1-yl]-4-hydroxy-2-pyrrolidinyl)methyl ester
acgctcacttccgaggagact

SEQ ID NO: 763 - RNA, 21 nt, synthetic construct
  source 1..21: mol_type = other RNA
  modified_base 1: mod_base = OTHER; note = 2'-O-methyluridine-3'-phosphorothioate
  modified_base 2: mod_base = OTHER; note = 2'-O-methylcytidine-3'-phosphorothioate
  modified_base 3: mod_base = OTHER; note = 2'-O-methylcytidine-3'-phosphate
  modified_base 4: mod_base = OTHER; note = 2'-O-methylguanosine-3'-phosphate
  modified_base 5: mod_base = OTHER; note = 2'-O-methyladenosine-3'-phosphate
  modified_base 6: mod_base = OTHER; note = 2'-O-methylguanosine-3'-phosphate
  modified_base 7: mod_base = OTHER; note = 2'-deoxy-2'-fluoroguanosine-3'-phosphate
  modified_base 8: mod_base = OTHER; note = 2'-O-methyladenosine-3'-phosphate
  modified_base 9: mod_base = OTHER; note = 2'-deoxy-2'-fluoroguanosine-3'-phosphate
  modified_base 10: mod_base = OTHER; note = 2'-deoxy-2'-fluoroadenosine-3'-phosphate
  modified_base 11: mod_base = OTHER; note = 2'-deoxy-2'-fluorocytidine-3'-phosphate
  modified_base 12: mod_base = OTHER; note = 2'-O-methylguanosine-3'-phosphate
  modified_base 13: mod_base = OTHER; note = 2'-O-methylcytidine-3'-phosphate
  modified_base 14: mod_base = OTHER; note = 2'-O-methylcytidine-3'-phosphate
  modified_base 15: mod_base = OTHER; note = 2'-O-methylguanosine-3'-phosphate
  modified_base 16: mod_base = OTHER; note = 2'-O-methyladenosine-3'-phosphate
  modified_base 17: mod_base = OTHER; note = 2'-O-methylcytidine-3'-phosphate
  modified_base 18: mod_base = OTHER; note = 2'-O-methylguanosine-3'-phosphate
  modified_base 19: mod_base = OTHER; note = 2'-O-methyladenosine-3'-phosphate
  modified_base 20: mod_base = OTHER; note = 2'-O-methyluridine-3'-phosphate
  modified_base 21: mod_base = OTHER; note = 2'-O-methyluridine-3'-phosphate ((2S,4R)-1-[29-[[2-(acetylamino)-2-deoxy-beta-D-galactopyra nosyl]oxy]-14,14-bis[[3-[[3-[[5-[[2-(acetylamino)-2-deoxy-b eta-D-galactopyranosyl]oxy]-1-oxopentyl]amino]propyl]amino] -3-oxopropoxy]methyl]-1,12,19,25-tetraoxo-16-oxa-13,20,24-t riazanonacos-1-yl]-4-hydroxy-2-pyrrolidinyl)methyl ester
tccgaggagacgccgacgatt

SEQ ID NO: 764 - RNA, 21 nt, synthetic construct
  source 1..21: mol_type = other RNA
  modified_base 1: mod_base = OTHER; note = 2'-O-methylguanosine-3'-phosphorothioate
  modified_base 2: mod_base = OTHER; note = 2'-O-methylcytidine-3'-phosphorothioate
  modified_base 3: mod_base = OTHER; note = 2'-O-methylcytidine-3'-phosphate
  modified_base 4: mod_base = OTHER; note = 2'-O-methylguanosine-3'-phosphate
  modified_base 5: mod_base = OTHER; note = 2'-O-methyladenosine-3'-phosphate
  modified_base 6: mod_base = OTHER; note = 2'-O-methylcytidine-3'-phosphate
  modified_base 7: mod_base = OTHER; note = 2'-deoxy-2'-fluoroguanosine-3'-phosphate
  modified_base 8: mod_base = OTHER; note = 2'-O-methyladenosine-3'-phosphate
  modified_base 9: mod_base = OTHER; note = 2'-deoxy-2'-fluorouridine-3'-phosphate
  modified_base 10: mod_base = OTHER; note = 2'-deoxy-2'-fluoroguanosine-3'-phosphate
  modified_base 11: mod_base = OTHER; note = 2'-deoxy-2'-fluoroadenosine-3'-phosphate
  modified_base 12: mod_base = OTHER; note = 2'-O-methyladenosine-3'-phosphate
  modified_base 13: mod_base = OTHER; note = 2'-O-methylguanosine-3'-phosphate
  modified_base 14: mod_base = OTHER; note = 2'-O-methyladenosine-3'-phosphate
  modified_base 15: mod_base = OTHER; note = 2'-O-methylcytidine-3'-phosphate
  modified_base 16: mod_base = OTHER; note = 2'-O-methyladenosine-3'-phosphate
  modified_base 17: mod_base = OTHER; note = 2'-O-methylcytidine-3'-phosphate
  modified_base 18: mod_base = OTHER; note = 2'-O-methylcytidine-3'-phosphate
  modified_base 19: mod_base = OTHER; note = 2'-O-methylguanosine-3'-phosphate
  modified_base 20: mod_base = OTHER; note = 2'-O-methyluridine-3'-phosphate
  modified_base 21: mod_base = OTHER; note = 2'-O-methyluridine-3'-phosphate ((2S,4R)-1-[29-[[2-(acetylamino)-2-deoxy-beta-D-galactopyra nosyl]oxy]-14,14-bis[[3-[[3-[[5-[[2-(acetylamino)-2-deoxy-b eta-D-galactopyranosyl]oxy]-1-oxopentyl]amino]propyl]amino] -3-oxopropoxy]methyl]-1,12,19,25-tetraoxo-16-oxa-13,20,24-t riazanonacos-1-yl]-4-hydroxy-2-pyrrolidinyl)methyl ester
gccgacgatgaagacaccgtt

SEQ ID NO: 765 - RNA, 21 nt, synthetic construct
  source 1..21: mol_type = other RNA
  modified_base 1: mod_base = OTHER; note = 2'-O-methyladenosine-3'-phosphorothioate
  modified_base 2: mod_base = OTHER; note = 2'-O-methyluridine-3'-phosphorothioate
  modified_base 3: mod_base = OTHER; note = 2'-O-methylguanosine-3'-phosphate
  modified_base 4: mod_base = OTHER; note = 2'-O-methyladenosine-3'-phosphate
  modified_base 5: mod_base = OTHER; note = 2'-O-methyladenosine-3'-phosphate
  modified_base 6: mod_base = OTHER; note = 2'-O-methylguanosine-3'-phosphate
  modified_base 7: mod_base = OTHER; note = 2'-deoxy-2'-fluoroadenosine-3'-phosphate
  modified_base 8: mod_base = OTHER; note = 2'-O-methylcytidine-3'-phosphate
  modified_base 9: mod_base = OTHER; note = 2'-deoxy-2'-fluoroadenosine-3'-phosphate
  modified_base 10: mod_base = OTHER; note = 2'-deoxy-2'-fluorocytidine-3'-phosphate
  modified_base 11: mod_base = OTHER; note = 2'-deoxy-2'-fluorocytidine-3'-phosphate
  modified_base 12: mod_base = OTHER; note = 2'-O-methylguanosine-3'-phosphate
  modified_base 13: mod_base = OTHER; note = 2'-O-methyluridine-3'-phosphate
  modified_base 14: mod_base = OTHER; note = 2'-O-methylguanosine-3'-phosphate
  modified_base 15: mod_base = OTHER; note = 2'-O-methylguanosine-3'-phosphate
  modified_base 16: mod_base = OTHER; note = 2'-O-methyladenosine-3'-phosphate
  modified_base 17: mod_base = OTHER; note = 2'-O-methyladenosine-3'-phosphate
  modified_base 18: mod_base = OTHER; note = 2'-O-methylguanosine-3'-phosphate
  modified_base 19: mod_base = OTHER; note = 2'-O-methylguanosine-3'-phosphate
  modified_base 20: mod_base = OTHER; note = 2'-O-methyluridine-3'-phosphate
  modified_base 21: mod_base = OTHER; note = 2'-O-methyluridine-3'-phosphate ((2S,4R)-1-[29-[[2-(acetylamino)-2-deoxy-beta-D-galactopyra nosyl]oxy]-14,14-bis[[3-[[3-[[5-[[2-(acetylamino)-2-deoxy-b eta-D-galactopyranosyl]oxy]-1-oxopentyl]amino]propyl]amino] -3-oxopropoxy]methyl]-1,12,19,25-tetraoxo-16-oxa-13,20,24-t riazanonacos-1-yl]-4-hydroxy-2-pyrrolidinyl)methyl ester
atgaagacaccgtggaaggtt

SEQ ID NO: 766 - RNA, 21 nt, synthetic construct
  source 1..21: mol_type = other RNA
  modified_base 1: mod_base = OTHER; note = 2'-O-methyladenosine-3'-phosphorothioate
  modified_base 2: mod_base = OTHER; note = 2'-O-methylcytidine-3'-phosphorothioate
  modified_base 3: mod_base = OTHER; note = 2'-O-methyladenosine-3'-phosphate
  modified_base 4: mod_base = OTHER; note = 2'-O-methylcytidine-3'-phosphate
  modified_base 5: mod_base = OTHER; note = 2'-O-methylcytidine-3'-phosphate
  modified_base 6: mod_base = OTHER; note = 2'-O-methylguanosine-3'-phosphate
  modified_base 7: mod_base = OTHER; note = 2'-deoxy-2'-fluorouridine-3'-phosphate
  modified_base 8: mod_base = OTHER; note = 2'-O-methylguanosine-3'-phosphate
  modified_base 9: mod_base = OTHER; note = 2'-deoxy-2'-fluoroguanosine-3'-phosphate
  modified_base 10: mod_base = OTHER; note = 2'-deoxy-2'-fluoroadenosine-3'-phosphate
  modified_base 11: mod_base = OTHER; note = 2'-deoxy-2'-fluoroadenosine-3'-phosphate
  modified_base 12: mod_base = OTHER; note = 2'-O-methylguanosine-3'-phosphate
  modified_base 13: mod_base = OTHER; note = 2'-O-methylguanosine-3'-phosphate
  modified_base 14: mod_base = OTHER; note = 2'-O-methyluridine-3'-phosphate
  modified_base 15: mod_base = OTHER; note = 2'-O-methyluridine-3'-phosphate
  modified_base 16: mod_base = OTHER; note = 2'-O-methylcytidine-3'-phosphate
  modified_base 17: mod_base = OTHER; note = 2'-O-methyluridine-3'-phosphate
  modified_base 18: mod_base = OTHER; note = 2'-O-methyluridine-3'-phosphate
  modified_base 19: mod_base = OTHER; note = 2'-O-methylcytidine-3'-phosphate
  modified_base 20: mod_base = OTHER; note = 2'-O-methyluridine-3'-phosphate
  modified_base 21: mod_base = OTHER; note = 2'-O-methyluridine-3'-phosphate ((2S,4R)-1-[29-[[2-(acetylamino)-2-deoxy-beta-D-galactopyra nosyl]oxy]-14,14-bis[[3-[[3-[[5-[[2-(acetylamino)-2-deoxy-b eta-D-galactopyranosyl]oxy]-1-oxopentyl]amino]propyl]amino] -3-oxopropoxy]methyl]-1,12,19,25-tetraoxo-16-oxa-13,20,24-t riazanonacos-1-yl]-4-hydroxy-2-pyrrolidinyl)methyl ester
acaccgtggaaggttcttctt

SEQ ID NO: 767 - RNA, 21 nt, synthetic construct
  source 1..21: mol_type = other RNA
  modified_base 1: mod_base = OTHER; note = 2'-O-methyluridine-3'-phosphorothioate
  modified_base 2: mod_base = OTHER; note = 2'-O-methylguanosine-3'-phosphorothioate
  modified_base 3: mod_base = OTHER; note = 2'-O-methylguanosine-3'-phosphate
  modified_base 4: mod_base = OTHER; note = 2'-O-methyladenosine-3'-phosphate
  modified_base 5: mod_base = OTHER; note = 2'-O-methyladenosine-3'-phosphate
  modified_base 6: mod_base = OTHER; note = 2'-O-methylguanosine-3'-phosphate
  modified_base 7: mod_base = OTHER; note = 2'-deoxy-2'-fluoroguanosine-3'-phosphate
  modified_base 8: mod_base = OTHER; note = 2'-O-methyluridine-3'-phosphate
  modified_base 9: mod_base = OTHER; note = 2'-deoxy-2'-fluorouridine-3'-phosphate
  modified_base 10: mod_base = OTHER; note = 2'-deoxy-2'-fluorocytidine-3'-phosphate
  modified_base 11: mod_base = OTHER; note = 2'-deoxy-2'-fluorouridine-3'-phosphate
  modified_base 12: mod_base = OTHER; note = 2'-O-methyluridine-3'-phosphate
  modified_base 13: mod_base = OTHER; note = 2'-O-methylcytidine-3'-phosphate
  modified_base 14: mod_base = OTHER; note = 2'-O-methyluridine-3'-phosphate
  modified_base 15: mod_base = OTHER; note = 2'-O-methylguanosine-3'-phosphate
  modified_base 16: mod_base = OTHER; note = 2'-O-methylguanosine-3'-phosphate
  modified_base 17: mod_base = OTHER; note = 2'-O-methylguanosine-3'-phosphate
  modified_base 18: mod_base = OTHER; note = 2'-O-methyladenosine-3'-phosphate
  modified_base 19: mod_base = OTHER; note = 2'-O-methylcytidine-3'-phosphate
  modified_base 20: mod_base = OTHER; note = 2'-O-methyluridine-3'-phosphate
  modified_base 21: mod_base = OTHER; note = 2'-O-methyluridine-3'-phosphate ((2S,4R)-1-[29-[[2-(acetylamino)-2-deoxy-beta-D-galactopyra nosyl]oxy]-14,14-bis[[3-[[3-[[5-[[2-(acetylamino)-2-deoxy-b eta-D-galactopyranosyl]oxy]-1-oxopentyl]amino]propyl]amino] -3-oxopropoxy]methyl]-1,12,19,25-tetraoxo-16-oxa-13,20,24-t riazanonacos-1-yl]-4-hydroxy-2-pyrrolidinyl)methyl ester
tggaaggttcttctgggactt

SEQ ID NO: 768 - RNA, 21 nt, synthetic construct
  source 1..21: mol_type = other RNA
  modified_base 1: mod_base = OTHER; note = 2'-O-methyluridine-3'-phosphorothioate
  modified_base 2: mod_base = OTHER; note = 2'-O-methylguanosine-3'-phosphorothioate
  modified_base 3: mod_base = OTHER; note = 2'-O-methylcytidine-3'-phosphate
  modified_base 4: mod_base = OTHER; note = 2'-O-methyluridine-3'-phosphate
  modified_base 5: mod_base = OTHER; note = 2'-O-methylguanosine-3'-phosphate
  modified_base 6: mod_base = OTHER; note = 2'-O-methylcytidine-3'-phosphate
  modified_base 7: mod_base = OTHER; note = 2'-deoxy-2'-fluorouridine-3'-phosphate
  modified_base 8: mod_base = OTHER; note = 2'-O-methylguanosine-3'-phosphate
  modified_base 9: mod_base = OTHER; note = 2'-deoxy-2'-fluorocytidine-3'-phosphate
  modified_base 10: mod_base = OTHER; note = 2'-deoxy-2'-fluoroguanosine-3'-phosphate
  modified_base 11: mod_base = OTHER; note = 2'-deoxy-2'-fluorocytidine-3'-phosphate
  modified_base 12: mod_base = OTHER; note = 2'-O-methyluridine-3'-phosphate
  modified_base 13: mod_base = OTHER; note = 2'-O-methyluridine-3'-phosphate
  modified_base 14: mod_base = OTHER; note = 2'-O-methylguanosine-3'-phosphate
  modified_base 15: mod_base = OTHER; note = 2'-O-methyluridine-3'-phosphate
  modified_base 16: mod_base = OTHER; note = 2'-O-methylcytidine-3'-phosphate
  modified_base 17: mod_base = OTHER; note = 2'-O-methyladenosine-3'-phosphate
  modified_base 18: mod_base = OTHER; note = 2'-O-methylcytidine-3'-phosphate
  modified_base 19: mod_base = OTHER; note = 2'-O-methylcytidine-3'-phosphate
  modified_base 20: mod_base = OTHER; note = 2'-O-methyladenosine-3'-phosphate
  modified_base 21: mod_base = OTHER; note = 2'-O-methyluridine-3'-phosphate ((2S,4R)-1-[29-[[2-(acetylamino)-2-deoxy-beta-D-galactopyra nosyl]oxy]-14,14-bis[[3-[[3-[[5-[[2-(acetylamino)-2-deoxy-b eta-D-galactopyranosyl]oxy]-1-oxopentyl]amino]propyl]amino] -3-oxopropoxy]methyl]-1,12,19,25-tetraoxo-16-oxa-13,20,24-t riazanonacos-1-yl]-4-hydroxy-2-pyrrolidinyl)methyl ester
tgctgctgcgcttgtcaccat

SEQ ID NO: 769 - RNA, 21 nt, synthetic construct
  source 1..21: mol_type = other RNA
  modified_base 1: mod_base = OTHER; note = 2'-O-methyluridine-3'-phosphorothioate
  modified_base 2: mod_base = OTHER; note = 2'-O-methylguanosine-3'-phosphorothioate
  modified_base 3: mod_base = OTHER; note = 2'-O-methylcytidine-3'-phosphate
  modified_base 4: mod_base = OTHER; note = 2'-O-methylguanosine-3'-phosphate
  modified_base 5: mod_base = OTHER; note = 2'-O-methylcytidine-3'-phosphate
  modified_base 6: mod_base = OTHER; note = 2'-O-methyluridine-3'-phosphate
  modified_base 7: mod_base = OTHER; note = 2'-deoxy-2'-fluorouridine-3'-phosphate
  modified_base 8: mod_base = OTHER; note = 2'-O-methylguanosine-3'-phosphate
  modified_base 9: mod_base = OTHER; note = 2'-deoxy-2'-fluorouridine-3'-phosphate
  modified_base 10: mod_base = OTHER; note = 2'-deoxy-2'-fluorocytidine-3'-phosphate
  modified_base 11: mod_base = OTHER; note = 2'-deoxy-2'-fluoroadenosine-3'-phosphate
  modified_base 12: mod_base = OTHER; note = 2'-O-methylcytidine-3'-phosphate
  modified_base 13: mod_base = OTHER; note = 2'-O-methylcytidine-3'-phosphate
  modified_base 14: mod_base = OTHER; note = 2'-O-methyladenosine-3'-phosphate
  modified_base 15: mod_base = OTHER; note = 2'-O-methyluridine-3'-phosphate
  modified_base 16: mod_base = OTHER; note = 2'-O-methylcytidine-3'-phosphate
  modified_base 17: mod_base = OTHER; note = 2'-O-methyladenosine-3'-phosphate
  modified_base 18: mod_base = OTHER; note = 2'-O-methyluridine-3'-phosphate
  modified_base 19: mod_base = OTHER; note = 2'-O-methylcytidine-3'-phosphate
  modified_base 20: mod_base = OTHER; note = 2'-O-methyladenosine-3'-phosphate
  modified_base 21: mod_base = OTHER; note = 2'-O-methyluridine-3'-phosphate ((2S,4R)-1-[29-[[2-(acetylamino)-2-deoxy-beta-D-galactopyra nosyl]oxy]-14,14-bis[[3-[[3-[[5-[[2-(acetylamino)-2-deoxy-b eta-D-galactopyranosyl]oxy]-1-oxopentyl]amino]propyl]amino] -3-oxopropoxy]methyl]-1,12,19,25-tetraoxo-16-oxa-13,20,24-t riazanonacos-1-yl]-4-hydroxy-2-pyrrolidinyl)methyl ester
tgcgcttgtcaccatcatcat

SEQ ID NO: 770 - RNA, 21 nt, synthetic construct
  source 1..21: mol_type = other RNA
  modified_base 1: mod_base = OTHER; note = 2'-O-methylcytidine-3'-phosphorothioate
  modified_base 2: mod_base = OTHER; note = 2'-O-methylguanosine-3'-phosphorothioate
  modified_base 3: mod_base = OTHER; note = 2'-O-methyluridine-3'-phosphate
  modified_base 4: mod_base = OTHER; note = 2'-O-methylguanosine-3'-phosphate
  modified_base 5: mod_base = OTHER; note = 2'-O-methylcytidine-3'-phosphate
  modified_base 6: mod_base = OTHER; note = 2'-O-methylcytidine-3'-phosphate
  modified_base 7: mod_base = OTHER; note = 2'-deoxy-2'-fluorocytidine-3'-phosphate
  modified_base 8: mod_base = OTHER; note = 2'-O-methylguanosine-3'-phosphate
  modified_base 9: mod_base = OTHER; note = 2'-deoxy-2'-fluorouridine-3'-phosphate
  modified_base 10: mod_base = OTHER; note = 2'-deoxy-2'-fluoroguanosine-3'-phosphate
  modified_base 11: mod_base = OTHER; note = 2'-deoxy-2'-fluoroguanosine-3'-phosphate
  modified_base 12: mod_base = OTHER; note = 2'-O-methyluridine-3'-phosphate
  modified_base 13: mod_base = OTHER; note = 2'-O-methyluridine-3'-phosphate
  modified_base 14: mod_base = OTHER; note = 2'-O-methylcytidine-3'-phosphate
  modified_base 15: mod_base = OTHER; note = 2'-O-methyluridine-3'-phosphate
  modified_base 16: mod_base = OTHER; note = 2'-O-methylguanosine-3'-phosphate
  modified_base 17: mod_base = OTHER; note = 2'-O-methylcytidine-3'-phosphate
  modified_base 18: mod_base = OTHER; note = 2'-O-methyluridine-3'-phosphate
  modified_base 19: mod_base = OTHER; note = 2'-O-methylguanosine-3'-phosphate
  modified_base 20: mod_base = OTHER; note = 2'-O-methyladenosine-3'-phosphate
  modified_base 21: mod_base = OTHER; note = 2'-O-methyluridine-3'-phosphate ((2S,4R)-1-[29-[[2-(acetylamino)-2-deoxy-beta-D-galactopyra nosyl]oxy]-14,14-bis[[3-[[3-[[5-[[2-(acetylamino)-2-deoxy-b eta-D-galactopyranosyl]oxy]-1-oxopentyl]amino]propyl]amino] -3-oxopropoxy]methyl]-1,12,19,25-tetraoxo-16-oxa-13,20,24-t riazanonacos-1-yl]-4-hydroxy-2-pyrrolidinyl)methyl ester
cgtgcccgtggttctgctgat

SEQ ID NO: 771 - RNA, 21 nt, synthetic construct
  source 1..21: mol_type = other RNA
  modified_base 1: mod_base = OTHER; note = 2'-O-methylcytidine-3'-phosphorothioate
  modified_base 2: mod_base = OTHER; note = 2'-O-methylguanosine-3'-phosphorothioate
  modified_base 3: mod_base = OTHER; note = 2'-O-methyluridine-3'-phosphate
  modified_base 4: mod_base = OTHER; note = 2'-O-methylguanosine-3'-phosphate
  modified_base 5: mod_base = OTHER; note = 2'-O-methylguanosine-3'-phosphate
  modified_base 6: mod_base = OTHER; note = 2'-O-methyluridine-3'-phosphate
  modified_base 7: mod_base = OTHER; note = 2'-deoxy-2'-fluorouridine-3'-phosphate
  modified_base 8: mod_base = OTHER; note = 2'-O-methylcytidine-3'-phosphate
  modified_base 9: mod_base = OTHER; note = 2'-deoxy-2'-fluorouridine-3'-phosphate
  modified_base 10: mod_base = OTHER; note = 2'-deoxy-2'-fluoroguanosine-3'-phosphate
  modified_base 11: mod_base = OTHER; note = 2'-deoxy-2'-fluorocytidine-3'-phosphate
  modified_base 12: mod_base = OTHER; note = 2'-O-methyluridine-3'-phosphate
  modified_base 13: mod_base = OTHER; note = 2'-O-methylguanosine-3'-phosphate
  modified_base 14: mod_base = OTHER; note = 2'-O-methyladenosine-3'-phosphate
  modified_base 15: mod_base = OTHER; note = 2'-O-methyladenosine-3'-phosphate
  modified_base 16: mod_base = OTHER; note = 2'-O-methylcytidine-3'-phosphate
  modified_base 17: mod_base = OTHER; note = 2'-O-methyladenosine-3'-phosphate
  modified_base 18: mod_base = OTHER; note = 2'-O-methyladenosine-3'-phosphate
  modified_base 19: mod_base = OTHER; note = 2'-O-methyladenosine-3'-phosphate
  modified_base 20: mod_base = OTHER; note = 2'-O-methylguanosine-3'-phosphate
  modified_base 21: mod_base = OTHER; note = 2'-O-methyluridine-3'-phosphate ((2S,4R)-1-[29-[[2-(acetylamino)-2-deoxy-beta-D-galactopyra nosyl]oxy]-14,14-bis[[3-[[3-[[5-[[2-(acetylamino)-2-deoxy-b eta-D-galactopyranosyl]oxy]-1-oxopentyl]amino]propyl]amino] -3-oxopropoxy]methyl]-1,12,19,25-tetraoxo-16-oxa-13,20,24-t riazanonacos-1-yl]-4-hydroxy-2-pyrrolidinyl)methyl ester
cgtggttctgctgaacaaagt

SEQ ID NO: 772 - RNA, 21 nt, synthetic construct
  source 1..21: mol_type = other RNA
  modified_base 1: mod_base = OTHER; note = 2'-O-methyluridine-3'-phosphorothioate
  modified_base 2: mod_base = OTHER; note = 2'-O-methylguanosine-3'-phosphorothioate
  modified_base 3: mod_base = OTHER; note = 2'-O-methylcytidine-3'-phosphate
  modified_base 4: mod_base = OTHER; note = 2'-O-methyluridine-3'-phosphate
  modified_base 5: mod_base = OTHER; note = 2'-O-methylguanosine-3'-phosphate
  modified_base 6: mod_base = OTHER; note = 2'-O-methyladenosine-3'-phosphate
  modified_base 7: mod_base = OTHER; note = 2'-deoxy-2'-fluoroadenosine-3'-phosphate
  modified_base 8: mod_base = OTHER; note = 2'-O-methylcytidine-3'-phosphate
  modified_base 9: mod_base = OTHER; note = 2'-deoxy-2'-fluoroadenosine-3'-phosphate
  modified_base 10: mod_base = OTHER; note = 2'-deoxy-2'-fluoroadenosine-3'-phosphate
  modified_base 11: mod_base = OTHER; note = 2'-deoxy-2'-fluoroadenosine-3'-phosphate
  modified_base 12: mod_base = OTHER; note = 2'-O-methylguanosine-3'-phosphate
  modified_base 13: mod_base = OTHER; note = 2'-O-methylguanosine-3'-phosphate
  modified_base 14: mod_base = OTHER; note = 2'-O-methylcytidine-3'-phosphate
  modified_base 15: mod_base = OTHER; note = 2'-O-methyladenosine-3'-phosphate
  modified_base 16: mod_base = OTHER; note = 2'-O-methylcytidine-3'-phosphate
  modified_base 17: mod_base = OTHER; note = 2'-O-methyladenosine-3'-phosphate
  modified_base 18: mod_base = OTHER; note = 2'-O-methylguanosine-3'-phosphate
  modified_base 19: mod_base = OTHER; note = 2'-O-methyladenosine-3'-phosphate
  modified_base 20: mod_base = OTHER; note = 2'-O-methyluridine-3'-phosphate
  modified_base 21: mod_base = OTHER; note = 2'-O-methyluridine-3'-phosphate ((2S,4R)-1-[29-[[2-(acetylamino)-2-deoxy-beta-D-galactopyra nosyl]oxy]-14,14-bis[[3-[[3-[[5-[[2-(acetylamino)-2-deoxy-b eta-D-galactopyranosyl]oxy]-1-oxopentyl]amino]propyl]amino] -3-oxopropoxy]methyl]-1,12,19,25-tetraoxo-16-oxa-13,20,24-t riazanonacos-1-yl]-4-hydroxy-2-pyrrolidinyl)methyl ester
tgctgaacaaaggcacagatt

SEQ ID NO: 773 - RNA, 21 nt, synthetic construct
  source 1..21: mol_type = other RNA
  modified_base 1: mod_base = OTHER; note = 2'-O-methyladenosine-3'-phosphorothioate
  modified_base 2: mod_base = OTHER; note = 2'-O-methylcytidine-3'-phosphorothioate
  modified_base 3: mod_base = OTHER; note = 2'-O-methyladenosine-3'-phosphate
  modified_base 4: mod_base = OTHER; note = 2'-O-methyladenosine-3'-phosphate
  modified_base 5: mod_base = OTHER; note = 2'-O-methyladenosine-3'-phosphate
  modified_base 6: mod_base = OTHER; note = 2'-O-methylguanosine-3'-phosphate
  modified_base 7: mod_base = OTHER; note = 2'-deoxy-2'-fluoroguanosine-3'-phosphate
  modified_base 8: mod_base = OTHER; note = 2'-O-methylcytidine-3'-phosphate
  modified_base 9: mod_base = OTHER; note = 2'-deoxy-2'-fluoroadenosine-3'-phosphate
  modified_base 10: mod_base = OTHER; note = 2'-deoxy-2'-fluorocytidine-3'-phosphate
  modified_base 11: mod_base = OTHER; note = 2'-deoxy-2'-fluoroadenosine-3'-phosphate
  modified_base 12: mod_base = OTHER; note = 2'-O-methylguanosine-3'-phosphate
  modified_base 13: mod_base = OTHER; note = 2'-O-methyladenosine-3'-phosphate
  modified_base 14: mod_base = OTHER; note = 2'-O-methyluridine-3'-phosphate
  modified_base 15: mod_base = OTHER; note = 2'-O-methylguanosine-3'-phosphate
  modified_base 16: mod_base = OTHER; note = 2'-O-methyladenosine-3'-phosphate
  modified_base 17: mod_base = OTHER; note = 2'-O-methyluridine-3'-phosphate
  modified_base 18: mod_base = OTHER; note = 2'-O-methylguanosine-3'-phosphate
  modified_base 19: mod_base = OTHER; note = 2'-O-methylcytidine-3'-phosphate
  modified_base 20: mod_base = OTHER; note = 2'-O-methyluridine-3'-phosphate
  modified_base 21: mod_base = OTHER; note = 2'-O-methyluridine-3'-phosphate ((2S,4R)-1-[29-[[2-(acetylamino)-2-deoxy-beta-D-galactopyra nosyl]oxy]-14,14-bis[[3-[[3-[[5-[[2-(acetylamino)-2-deoxy-b eta-D-galactopyranosyl]oxy]-1-oxopentyl]amino]propyl]amino] -3-oxopropoxy]methyl]-1,12,19,25-tetraoxo-16-oxa-13,20,24-t riazanonacos-1-yl]-4-hydroxy-2-pyrrolidinyl)methyl ester
acaaaggcacagatgatgctt

SEQ ID NO: 774 - RNA, 21 nt, synthetic construct
  source 1..21: mol_type = other RNA
  modified_base 1: mod_base = OTHER; note = 2'-O-methylguanosine-3'-phosphorothioate
  modified_base 2: mod_base = OTHER; note = 2'-O-methylcytidine-3'-phosphorothioate
  modified_base 3: mod_base = OTHER; note = 2'-O-methyladenosine-3'-phosphate
  modified_base 4: mod_base = OTHER; note = 2'-O-methylcytidine-3'-phosphate
  modified_base 5: mod_base = OTHER; note = 2'-O-methyladenosine-3'-phosphate
  modified_base 6: mod_base = OTHER; note = 2'-O-methylguanosine-3'-phosphate
  modified_base 7: mod_base = OTHER; note = 2'-deoxy-2'-fluoroadenosine-3'-phosphate
  modified_base 8: mod_base = OTHER; note = 2'-O-methyluridine-3'-phosphate
  modified_base 9: mod_base = OTHER; note = 2'-deoxy-2'-fluoroguanosine-3'-phosphate
  modified_base 10: mod_base = OTHER; note = 2'-deoxy-2'-fluoroadenosine-3'-phosphate
  modified_base 11: mod_base = OTHER; note = 2'-deoxy-2'-fluorouridine-3'-phosphate
  modified_base 12: mod_base = OTHER; note = 2'-O-methylguanosine-3'-phosphate
  modified_base 13: mod_base = OTHER; note = 2'-O-methylcytidine-3'-phosphate
  modified_base 14: mod_base = OTHER; note = 2'-O-methyluridine-3'-phosphate
  modified_base 15: mod_base = OTHER; note = 2'-O-methyladenosine-3'-phosphate
  modified_base 16: mod_base = OTHER; note = 2'-O-methylcytidine-3'-phosphate
  modified_base 17: mod_base = OTHER; note = 2'-O-methyladenosine-3'-phosphate
  modified_base 18: mod_base = OTHER; note = 2'-O-methylguanosine-3'-phosphate
  modified_base 19: mod_base = OTHER; note = 2'-O-methylcytidine-3'-phosphate
  modified_base 20: mod_base = OTHER; note = 2'-O-methyluridine-3'-phosphate
  modified_base 21: mod_base = OTHER; note = 2'-O-methyluridine-3'-phosphate ((2S,4R)-1-[29-[[2-(acetylamino)-2-deoxy-beta-D-galactopyra nosyl]oxy]-14,14-bis[[3-[[3-[[5-[[2-(acetylamino)-2-deoxy-b eta-D-galactopyranosyl]oxy]-1-oxopentyl]amino]propyl]amino] -3-oxopropoxy]methyl]-1,12,19,25-tetraoxo-16-oxa-13,20,24-t riazanonacos-1-yl]-4-hydroxy-2-pyrrolidinyl)methyl ester
gcacagatgatgctacagctt

SEQ ID NO: 775 - RNA, 21 nt, synthetic construct
  source 1..21: mol_type = other RNA
  modified_base 1: mod_base = OTHER; note = 2'-O-methylguanosine-3'-phosphorothioate
  modified_base 2: mod_base = OTHER; note = 2'-O-methyladenosine-3'-phosphorothioate
  modified_base 3: mod_base = OTHER; note = 2'-O-methyluridine-3'-phosphate
  modified_base 4: mod_base = OTHER; note = 2'-O-methylguanosine-3'-phosphate
  modified_base 5: mod_base = OTHER; note = 2'-O-methylcytidine-3'-phosphate
  modified_base 6: mod_base = OTHER; note = 2'-O-methyluridine-3'-phosphate
  modified_base 7: mod_base = OTHER; note = 2'-deoxy-2'-fluoroadenosine-3'-phosphate
  modified_base 8: mod_base = OTHER; note = 2'-O-methylcytidine-3'-phosphate
  modified_base 9: mod_base = OTHER; note = 2'-deoxy-2'-fluoroadenosine-3'-phosphate
  modified_base 10: mod_base = OTHER; note = 2'-deoxy-2'-fluoroguanosine-3'-phosphate
  modified_base 11: mod_base = OTHER; note = 2'-deoxy-2'-fluorocytidine-3'-phosphate
  modified_base 12: mod_base = OTHER; note = 2'-O-methyluridine-3'-phosphate
  modified_base 13: mod_base = OTHER; note = 2'-O-methylguanosine-3'-phosphate
  modified_base 14: mod_base = OTHER; note = 2'-O-methyladenosine-3'-phosphate
  modified_base 15: mod_base = OTHER; note = 2'-O-methylcytidine-3'-phosphate
  modified_base 16: mod_base = OTHER; note = 2'-O-methyladenosine-3'-phosphate
  modified_base 17: mod_base = OTHER; note = 2'-O-methylguanosine-3'-phosphate
  modified_base 18: mod_base = OTHER; note = 2'-O-methyluridine-3'-phosphate
  modified_base 19: mod_base = OTHER; note = 2'-O-methylcytidine-3'-phosphate
  modified_base 20: mod_base = OTHER; note = 2'-O-methylguanosine-3'-phosphate
  modified_base 21: mod_base = OTHER; note = 2'-O-methyluridine-3'-phosphate ((2S,4R)-1-[29-[[2-(acetylamino)-2-deoxy-beta-D-galactopyra nosyl]oxy]-14,14-bis[[3-[[3-[[5-[[2-(acetylamino)-2-deoxy-b eta-D-galactopyranosyl]oxy]-1-oxopentyl]amino]propyl]amino] -3-oxopropoxy]methyl]-1,12,19,25-tetraoxo-16-oxa-13,20,24-t riazanonacos-1-yl]-4-hydroxy-2-pyrrolidinyl)methyl ester
gatgctacagctgacagtcgt

SEQ ID NO: 776 - RNA, 21 nt, synthetic construct
  source 1..21: mol_type = other RNA
  modified_base 1: mod_base = OTHER; note = 2'-O-methylcytidine-3'-phosphorothioate
  modified_base 2: mod_base = OTHER; note = 2'-O-methyladenosine-3'-phosphorothioate
  modified_base 3: mod_base = OTHER; note = 2'-O-methylguanosine-3'-phosphate
  modified_base 4: mod_base = OTHER; note = 2'-O-methylcytidine-3'-phosphate
  modified_base 5: mod_base = OTHER; note = 2'-O-methyluridine-3'-phosphate
  modified_base 6: mod_base = OTHER; note = 2'-O-methylguanosine-3'-phosphate
  modified_base 7: mod_base = OTHER; note = 2'-deoxy-2'-fluoroadenosine-3'-phosphate
  modified_base 8: mod_base = OTHER; note = 2'-O-methylcytidine-3'-phosphate
  modified_base 9: mod_base = OTHER; note = 2'-deoxy-2'-fluoroadenosine-3'-phosphate
  modified_base 10: mod_base = OTHER; note = 2'-deoxy-2'-fluoroguanosine-3'-phosphate
  modified_base 11: mod_base = OTHER; note = 2'-deoxy-2'-fluorouridine-3'-phosphate
  modified_base 12: mod_base = OTHER; note = 2'-O-methylcytidine-3'-phosphate
  modified_base 13: mod_base = OTHER; note = 2'-O-methylguanosine-3'-phosphate
  modified_base 14: mod_base = OTHER; note = 2'-O-methylcytidine-3'-phosphate
  modified_base 15: mod_base = OTHER; note = 2'-O-methyladenosine-3'-phosphate
  modified_base 16: mod_base = OTHER; note = 2'-O-methyladenosine-3'-phosphate
  modified_base 17: mod_base = OTHER; note = 2'-O-methyladenosine-3'-phosphate
  modified_base 18: mod_base = OTHER; note = 2'-O-methyladenosine-3'-phosphate
  modified_base 19: mod_base = OTHER; note = 2'-O-methylcytidine-3'-phosphate
  modified_base 20: mod_base = OTHER; note = 2'-O-methyluridine-3'-phosphate
  modified_base 21: mod_base = OTHER; note = 2'-O-methyluridine-3'-phosphate ((2S,4R)-1-[29-[[2-(acetylamino)-2-deoxy-beta-D-galactopyra nosyl]oxy]-14,14-bis[[3-[[3-[[5-[[2-(acetylamino)-2-deoxy-b eta-D-galactopyranosyl]oxy]-1-oxopentyl]amino]propyl]amino] -3-oxopropoxy]methyl]-1,12,19,25-tetraoxo-16-oxa-13,20,24-t riazanonacos-1-yl]-4-hydroxy-2-pyrrolidinyl)methyl ester
cagctgacagtcgcaaaactt

SEQ ID NO: 777 - RNA, 21 nt, synthetic construct
  source 1..21: mol_type = other RNA
  modified_base 1: mod_base = OTHER; note = 2'-O-methyladenosine-3'-phosphorothioate
  modified_base 2: mod_base = OTHER; note = 2'-O-methylcytidine-3'-phosphorothioate
  modified_base 3: mod_base = OTHER; note = 2'-O-methyladenosine-3'-phosphate
  modified_base 4: mod_base = OTHER; note = 2'-O-methylguanosine-3'-phosphate
  modified_base 5: mod_base = OTHER; note = 2'-O-methyluridine-3'-phosphate
  modified_base 6: mod_base = OTHER; note = 2'-O-methylcytidine-3'-phosphate
  modified_base 7: mod_base = OTHER; note = 2'-deoxy-2'-fluoroguanosine-3'-phosphate
  modified_base 8: mod_base = OTHER; note = 2'-O-methylcytidine-3'-phosphate
  modified_base 9: mod_base = OTHER; note = 2'-deoxy-2'-fluoroadenosine-3'-phosphate
  modified_base 10: mod_base = OTHER; note = 2'-deoxy-2'-fluoroadenosine-3'-phosphate
  modified_base 11: mod_base = OTHER; note = 2'-deoxy-2'-fluoroadenosine-3'-phosphate
  modified_base 12: mod_base = OTHER; note = 2'-O-methyladenosine-3'-phosphate
  modified_base 13: mod_base = OTHER; note = 2'-O-methylcytidine-3'-phosphate
  modified_base 14: mod_base = OTHER; note = 2'-O-methyluridine-3'-phosphate
  modified_base 15: mod_base = OTHER; note = 2'-O-methyluridine-3'-phosphate
  modified_base 16: mod_base = OTHER; note = 2'-O-methyladenosine-3'-phosphate
  modified_base 17: mod_base = OTHER; note = 2'-O-methylcytidine-3'-phosphate
  modified_base 18: mod_base = OTHER; note = 2'-O-methyladenosine-3'-phosphate
  modified_base 19: mod_base = OTHER; note = 2'-O-methylcytidine-3'-phosphate
  modified_base 20: mod_base = OTHER; note = 2'-O-methyluridine-3'-phosphate
  modified_base 21: mod_base = OTHER; note = 2'-O-methyluridine-3'-phosphate ((2S,4R)-1-[29-[[2-(acetylamino)-2-deoxy-beta-D-galactopyra nosyl]oxy]-14,14-bis[[3-[[3-[[5-[[2-(acetylamino)-2-deoxy-b eta-D-galactopyranosyl]oxy]-1-oxopentyl]amino]propyl]amino] -3-oxopropoxy]methyl]-1,12,19,25-tetraoxo-16-oxa-13,20,24-t riazanonacos-1-yl]-4-hydroxy-2-pyrrolidinyl)methyl ester
acagtcgcaaaacttacactt

SEQ ID NO: 778 - RNA, 21 nt, synthetic construct
  source 1..21: mol_type = other RNA
  modified_base 1: mod_base = OTHER; note = 2'-O-methyladenosine-3'-phosphorothioate
  modified_base 2: mod_base = OTHER; note = 2'-O-methyladenosine-3'-phosphorothioate
  modified_base 3: mod_base = OTHER; note = 2'-O-methylcytidine-3'-phosphate
  modified_base 4: mod_base = OTHER; note = 2'-O-methyluridine-3'-phosphate
  modified_base 5: mod_base = OTHER; note = 2'-O-methyluridine-3'-phosphate
  modified_base 6: mod_base = OTHER; note = 2'-O-methyladenosine-3'-phosphate
  modified_base 7: mod_base = OTHER; note = 2'-deoxy-2'-fluorocytidine-3'-phosphate
  modified_base 8: mod_base = OTHER; note = 2'-O-methyladenosine-3'-phosphate
  modified_base 9: mod_base = OTHER; note = 2'-deoxy-2'-fluorocytidine-3'-phosphate
  modified_base 10: mod_base = OTHER; note = 2'-deoxy-2'-fluorouridine-3'-phosphate
  modified_base 11: mod_base = OTHER; note = 2'-deoxy-2'-fluorocytidine-3'-phosphate
  modified_base 12: mod_base = OTHER; note = 2'-O-methyluridine-3'-phosphate
  modified_base 13: mod_base = OTHER; note = 2'-O-methyladenosine-3'-phosphate
  modified_base 14: mod_base = OTHER; note = 2'-O-methyladenosine-3'-phosphate
  modified_base 15: mod_base = OTHER; note = 2'-O-methylcytidine-3'-phosphate
  modified_base 16: mod_base = OTHER; note = 2'-O-methyluridine-3'-phosphate
  modified_base 17: mod_base = OTHER; note = 2'-O-methylguanosine-3'-phosphate
  modified_base 18: mod_base = OTHER; note = 2'-O-methyladenosine-3'-phosphate
  modified_base 19: mod_base = OTHER; note = 2'-O-methyluridine-3'-phosphate
  modified_base 20: mod_base = OTHER; note = 2'-O-methyluridine-3'-phosphate
  modified_base 21: mod_base = OTHER; note = 2'-O-methyluridine-3'-phosphate ((2S,4R)-1-[29-[[2-(acetylamino)-2-deoxy-beta-D-galactopyra nosyl]oxy]-14,14-bis[[3-[[3-[[5-[[2-(acetylamino)-2-deoxy-b eta-D-galactopyranosyl]oxy]-1-oxopentyl]amino]propyl]amino] -3-oxopropoxy]methyl]-1,12,19,25-tetraoxo-16-oxa-13,20,24-t riazanonacos-1-yl]-4-hydroxy-2-pyrrolidinyl)methyl ester
aacttacactctaactgattt

SEQ ID NO: 779 - RNA, 21 nt, synthetic construct
  source 1..21: mol_type = other RNA
  modified_base 1: mod_base = OTHER; note = 2'-O-methylcytidine-3'-phosphorothioate
  modified_base 2: mod_base = OTHER; note = 2'-O-methyladenosine-3'-phosphorothioate
  modified_base 3: mod_base = OTHER; note = 2'-O-methylcytidine-3'-phosphate
  modified_base 4: mod_base = OTHER; note = 2'-O-methyluridine-3'-phosphate
  modified_base 5: mod_base = OTHER; note = 2'-O-methylcytidine-3'-phosphate
  modified_base 6: mod_base = OTHER; note = 2'-O-methyluridine-3'-phosphate
  modified_base 7: mod_base = OTHER; note = 2'-deoxy-2'-fluoroadenosine-3'-phosphate
  modified_base 8: mod_base = OTHER; note = 2'-O-methyladenosine-3'-phosphate
  modified_base 9: mod_base = OTHER; note = 2'-deoxy-2'-fluorocytidine-3'-phosphate
  modified_base 10: mod_base = OTHER; note = 2'-deoxy-2'-fluorouridine-3'-phosphate
  modified_base 11: mod_base = OTHER; note = 2'-deoxy-2'-fluoroguanosine-3'-phosphate
  modified_base 12: mod_base = OTHER; note = 2'-O-methyladenosine-3'-phosphate
  modified_base 13: mod_base = OTHER; note = 2'-O-methyluridine-3'-phosphate
  modified_base 14: mod_base = OTHER; note = 2'-O-methyluridine-3'-phosphate
  modified_base 15: mod_base = OTHER; note = 2'-O-methyladenosine-3'-phosphate
  modified_base 16: mod_base = OTHER; note = 2'-O-methylcytidine-3'-phosphate
  modified_base 17: mod_base = OTHER; note = 2'-O-methyluridine-3'-phosphate
  modified_base 18: mod_base = OTHER; note = 2'-O-methyluridine-3'-phosphate
  modified_base 19: mod_base = OTHER; note = 2'-O-methyladenosine-3'-phosphate
  modified_base 20: mod_base = OTHER; note = 2'-O-methyladenosine-3'-phosphate
  modified_base 21: mod_base = OTHER; note = 2'-O-methyluridine-3'-phosphate ((2S,4R)-1-[29-[[2-(acetylamino)-2-deoxy-beta-D-galactopyra nosyl]oxy]-14,14-bis[[3-[[3-[[5-[[2-(acetylamino)-2-deoxy-b eta-D-galactopyranosyl]oxy]-1-oxopentyl]amino]propyl]amino] -3-oxopropoxy]methyl]-1,12,19,25-tetraoxo-16-oxa-13,20,24-t riazanonacos-1-yl]-4-hydroxy-2-pyrrolidinyl)methyl ester
cactctaactgattacttaat

SEQ ID NO: 780 - RNA, 21 nt, synthetic construct
  source 1..21: mol_type = other RNA
  modified_base 1: mod_base = OTHER; note = 2'-O-methyluridine-3'-phosphorothioate
  modified_base 2: mod_base = OTHER; note = 2'-O-methyluridine-3'-phosphorothioate
  modified_base 3: mod_base = OTHER; note = 2'-O-methyladenosine-3'-phosphate
  modified_base 4: mod_base = OTHER; note = 2'-O-methyluridine-3'-phosphate
  modified_base 5: mod_base = OTHER; note = 2'-O-methyladenosine-3'-phosphate
  modified_base 6: mod_base = OTHER; note = 2'-O-methylguanosine-3'-phosphate
  modified_base 7: mod_base = OTHER; note = 2'-deoxy-2'-fluoroadenosine-3'-phosphate
  modified_base 8: mod_base = OTHER; note = 2'-O-methylcytidine-3'-phosphate
  modified_base 9: mod_base = OTHER; note = 2'-deoxy-2'-fluorouridine-3'-phosphate
  modified_base 10: mod_base = OTHER; note = 2'-deoxy-2'-fluoroguanosine-3'-phosphate
  modified_base 11: mod_base = OTHER; note = 2'-deoxy-2'-fluoroadenosine-3'-phosphate
  modified_base 12: mod_base = OTHER; note = 2'-O-methyladenosine-3'-phosphate
  modified_base 13: mod_base = OTHER; note = 2'-O-methylguanosine-3'-phosphate
  modified_base 14: mod_base = OTHER; note = 2'-O-methyluridine-3'-phosphate
  modified_base 15: mod_base = OTHER; note = 2'-O-methyluridine-3'-phosphate
  modified_base 16: mod_base = OTHER; note = 2'-O-methyladenosine-3'-phosphate
  modified_base 17: mod_base = OTHER; note = 2'-O-methyluridine-3'-phosphate
  modified_base 18: mod_base = OTHER; note = 2'-O-methyladenosine-3'-phosphate
  modified_base 19: mod_base = OTHER; note = 2'-O-methylcytidine-3'-phosphate
  modified_base 20: mod_base = OTHER; note = 2'-O-methyluridine-3'-phosphate
  modified_base 21: mod_base = OTHER; note = 2'-O-methyluridine-3'-phosphate ((2S,4R)-1-[29-[[2-(acetylamino)-2-deoxy-beta-D-galactopyra nosyl]oxy]-14,14-bis[[3-[[3-[[5-[[2-(acetylamino)-2-deoxy-b eta-D-galactopyranosyl]oxy]-1-oxopentyl]amino]propyl]amino] -3-oxopropoxy]methyl]-1,12,19,25-tetraoxo-16-oxa-13,20,24-t riazanonacos-1-yl]-4-hydroxy-2-pyrrolidinyl)methyl ester
ttatagactgaagttatactt

SEQ ID NO: 781 - RNA, 21 nt, synthetic construct
  source 1..21: mol_type = other RNA
  modified_base 1: mod_base = OTHER; note = 2'-O-methylguanosine-3'-phosphorothioate
  modified_base 2: mod_base = OTHER; note = 2'-O-methyladenosine-3'-phosphorothioate
  modified_base 3: mod_base = OTHER; note = 2'-O-methyladenosine-3'-phosphate
  modified_base 4: mod_base = OTHER; note = 2'-O-methylguanosine-3'-phosphate
  modified_base 5: mod_base = OTHER; note = 2'-O-methyluridine-3'-phosphate
  modified_base 6: mod_base = OTHER; note = 2'-O-methyluridine-3'-phosphate
  modified_base 7: mod_base = OTHER; note = 2'-deoxy-2'-fluoroadenosine-3'-phosphate
  modified_base 8: mod_base = OTHER; note = 2'-O-methyluridine-3'-phosphate
  modified_base 9: mod_base = OTHER; note = 2'-deoxy-2'-fluoroadenosine-3'-phosphate
  modified_base 10: mod_base = OTHER; note = 2'-deoxy-2'-fluorocytidine-3'-phosphate
  modified_base 11: mod_base = OTHER; note = 2'-deoxy-2'-fluorouridine-3'-phosphate
  modified_base 12: mod_base = OTHER; note = 2'-O-methylcytidine-3'-phosphate
  modified_base 13: mod_base = OTHER; note = 2'-O-methylcytidine-3'-phosphate
  modified_base 14: mod_base = OTHER; note = 2'-O-methyluridine-3'-phosphate
  modified_base 15: mod_base = OTHER; note = 2'-O-methyluridine-3'-phosphate
  modified_base 16: mod_base = OTHER; note = 2'-O-methyladenosine-3'-phosphate
  modified_base 17: mod_base = OTHER; note = 2'-O-methyladenosine-3'-phosphate
  modified_base 18: mod_base = OTHER; note = 2'-O-methylguanosine-3'-phosphate
  modified_base 19: mod_base = OTHER; note = 2'-O-methyladenosine-3'-phosphate
  modified_base 20: mod_base = OTHER; note = 2'-O-methyluridine-3'-phosphate
  modified_base 21: mod_base = OTHER; note = 2'-O-methyluridine-3'-phosphate ((2S,4R)-1-[29-[[2-(acetylamino)-2-deoxy-beta-D-galactopyra nosyl]oxy]-14,14-bis[[3-[[3-[[5-[[2-(acetylamino)-2-deoxy-b eta-D-galactopyranosyl]oxy]-1-oxopentyl]amino]propyl]amino] -3-oxopropoxy]methyl]-1,12,19,25-tetraoxo-16-oxa-13,20,24-t riazanonacos-1-yl]-4-hydroxy-2-pyrrolidinyl)methyl ester
gaagttatactccttaagatt

SEQ ID NO: 782 - RNA, 21 nt, synthetic construct
  source 1..21: mol_type = other RNA
  modified_base 1: mod_base = OTHER; note = 2'-O-methylcytidine-3'-phosphorothioate
  modified_base 2: mod_base = OTHER; note = 2'-O-methyluridine-3'-phosphorothioate
  modified_base 3: mod_base = OTHER; note = 2'-O-methylcytidine-3'-phosphate
  modified_base 4: mod_base = OTHER; note = 2'-O-methylcytidine-3'-phosphate
  modified_base 5: mod_base = OTHER; note = 2'-O-methyluridine-3'-phosphate
  modified_base 6: mod_base = OTHER; note = 2'-O-methyluridine-3'-phosphate
  modified_base 7: mod_base = OTHER; note = 2'-deoxy-2'-fluoroadenosine-3'-phosphate
  modified_base 8: mod_base = OTHER; note = 2'-O-methyladenosine-3'-phosphate
  modified_base 9: mod_base = OTHER; note = 2'-deoxy-2'-fluoroguanosine-3'-phosphate
  modified_base 10: mod_base = OTHER; note = 2'-deoxy-2'-fluoroadenosine-3'-phosphate
  modified_base 11: mod_base = OTHER; note = 2'-deoxy-2'-fluorouridine-3'-phosphate
  modified_base 12: mod_base = OTHER; note = 2'-O-methylguanosine-3'-phosphate
  modified_base 13: mod_base = OTHER; note = 2'-O-methylguanosine-3'-phosphate
  modified_base 14: mod_base = OTHER; note = 2'-O-methyladenosine-3'-phosphate
  modified_base 15: mod_base = OTHER; note = 2'-O-methyluridine-3'-phosphate
  modified_base 16: mod_base = OTHER; note = 2'-O-methyluridine-3'-phosphate
  modified_base 17: mod_base = OTHER; note = 2'-O-methyluridine-3'-phosphate
  modified_base 18: mod_base = OTHER; note = 2'-O-methylcytidine-3'-phosphate
  modified_base 19: mod_base = OTHER; note = 2'-O-methyladenosine-3'-phosphate
  modified_base 20: mod_base = OTHER; note = 2'-O-methylguanosine-3'-phosphate
  modified_base 21: mod_base = OTHER; note = 2'-O-methyluridine-3'-phosphate ((2S,4R)-1-[29-[[2-(acetylamino)-2-deoxy-beta-D-galactopyra nosyl]oxy]-14,14-bis[[3-[[3-[[5-[[2-(acetylamino)-2-deoxy-b eta-D-galactopyranosyl]oxy]-1-oxopentyl]amino]propyl]amino] -3-oxopropoxy]methyl]-1,12,19,25-tetraoxo-16-oxa-13,20,24-t riazanonacos-1-yl]-4-hydroxy-2-pyrrolidinyl)methyl ester
ctccttaagatggatttcagt

SEQ ID NO: 783 - RNA, 21 nt, synthetic construct
  source 1..21: mol_type = other RNA
  modified_base 1: mod_base = OTHER; note = 2'-O-methyladenosine-3'-phosphorothioate
  modified_base 2: mod_base = OTHER; note = 2'-O-methylguanosine-3'-phosphorothioate
  modified_base 3: mod_base = OTHER; note = 2'-O-methyladenosine-3'-phosphate
  modified_base 4: mod_base = OTHER; note = 2'-O-methyluridine-3'-phosphate
  modified_base 5: mod_base = OTHER; note = 2'-O-methylguanosine-3'-phosphate
  modified_base 6: mod_base = OTHER; note = 2'-O-methylguanosine-3'-phosphate
  modified_base 7: mod_base = OTHER; note = 2'-deoxy-2'-fluoroadenosine-3'-phosphate
  modified_base 8: mod_base = OTHER; note = 2'-O-methyluridine-3'-phosphate
  modified_base 9: mod_base = OTHER; note = 2'-deoxy-2'-fluorouridine-3'-phosphate
  modified_base 10: mod_base = OTHER; note = 2'-deoxy-2'-fluorouridine-3'-phosphate
  modified_base 11: mod_base = OTHER; note = 2'-deoxy-2'-fluorocytidine-3'-phosphate
  modified_base 12: mod_base = OTHER; note = 2'-O-methyladenosine-3'-phosphate
  modified_base 13: mod_base = OTHER; note = 2'-O-methylguanosine-3'-phosphate
  modified_base 14: mod_base = OTHER; note = 2'-O-methyladenosine-3'-phosphate
  modified_base 15: mod_base = OTHER; note = 2'-O-methyluridine-3'-phosphate
  modified_base 16: mod_base = OTHER; note = 2'-O-methylcytidine-3'-phosphate
  modified_base 17: mod_base = OTHER; note = 2'-O-methyladenosine-3'-phosphate
  modified_base 18: mod_base = OTHER; note = 2'-O-methyluridine-3'-phosphate
  modified_base 19: mod_base = OTHER; note = 2'-O-methylguanosine-3'-phosphate
  modified_base 20: mod_base = OTHER; note = 2'-O-methyladenosine-3'-phosphate
  modified_base 21: mod_base = OTHER; note = 2'-O-methyluridine-3'-phosphate ((2S,4R)-1-[29-[[2-(acetylamino)-2-deoxy-beta-D-galactopyra nosyl]oxy]-14,14-bis[[3-[[3-[[5-[[2-(acetylamino)-2-deoxy-b eta-D-galactopyranosyl]oxy]-1-oxopentyl]amino]propyl]amino] -3-oxopropoxy]methyl]-1,12,19,25-tetraoxo-16-oxa-13,20,24-t riazanonacos-1-yl]-4-hydroxy-2-pyrrolidinyl)methyl ester
agatggatttcagatcatgat

SEQ ID NO: 784 - RNA, 21 nt, synthetic construct
  source 1..21: mol_type = other RNA
  modified_base 1: mod_base = OTHER; note = 2'-O-methyladenosine-3'-phosphorothioate
  modified_base 2: mod_base = OTHER; note = 2'-O-methyluridine-3'-phosphorothioate
  modified_base 3: mod_base = OTHER; note = 2'-O-methyluridine-3'-phosphate
  modified_base 4: mod_base = OTHER; note = 2'-O-methyluridine-3'-phosphate
  modified_base 5: mod_base = OTHER; note = 2'-O-methylcytidine-3'-phosphate
  modified_base 6: mod_base = OTHER; note = 2'-O-methyladenosine-3'-phosphate
  modified_base 7: mod_base = OTHER; note = 2'-deoxy-2'-fluoroguanosine-3'-phosphate
  modified_base 8: mod_base = OTHER; note = 2'-O-methyladenosine-3'-phosphate
  modified_base 9: mod_base = OTHER; note = 2'-deoxy-2'-fluorouridine-3'-phosphate
  modified_base 10: mod_base = OTHER; note = 2'-deoxy-2'-fluorocytidine-3'-phosphate
  modified_base 11: mod_base = OTHER; note = 2'-deoxy-2'-fluoroadenosine-3'-phosphate
  modified_base 12: mod_base = OTHER; note = 2'-O-methyluridine-3'-phosphate
  modified_base 13: mod_base = OTHER; note = 2'-O-methylguanosine-3'-phosphate
  modified_base 14: mod_base = OTHER; note = 2'-O-methyladenosine-3'-phosphate
  modified_base 15: mod_base = OTHER; note = 2'-O-methyladenosine-3'-phosphate
  modified_base 16: mod_base = OTHER; note = 2'-O-methyluridine-3'-phosphate
  modified_base 17: mod_base = OTHER; note = 2'-O-methyladenosine-3'-phosphate
  modified_base 18: mod_base = OTHER; note = 2'-O-methyluridine-3'-phosphate
  modified_base 19: mod_base = OTHER; note = 2'-O-methylcytidine-3'-phosphate
  modified_base 20: mod_base = OTHER; note = 2'-O-methyluridine-3'-phosphate
  modified_base 21: mod_base = OTHER; note = 2'-O-methyluridine-3'-phosphate ((2S,4R)-1-[29-[[2-(acetylamino)-2-deoxy-beta-D-galactopyra nosyl]oxy]-14,14-bis[[3-[[3-[[5-[[2-(acetylamino)-2-deoxy-b eta-D-galactopyranosyl]oxy]-1-oxopentyl]amino]propyl]amino] -3-oxopropoxy]methyl]-1,12,19,25-tetraoxo-16-oxa-13,20,24-t riazanonacos-1-yl]-4-hydroxy-2-pyrrolidinyl)methyl ester
atttcagatcatgaatatctt

SEQ ID NO: 785 - RNA, 21 nt, synthetic construct
  source 1..21: mol_type = other RNA
  modified_base 1: mod_base = OTHER; note = 2'-O-methyladenosine-3'-phosphorothioate
  modified_base 2: mod_base = OTHER; note = 2'-O-methyluridine-3'-phosphorothioate
  modified_base 3: mod_base = OTHER; note = 2'-O-methylcytidine-3'-phosphate
  modified_base 4: mod_base = OTHER; note = 2'-O-methyladenosine-3'-phosphate
  modified_base 5: mod_base = OTHER; note = 2'-O-methyluridine-3'-phosphate
  modified_base 6: mod_base = OTHER; note = 2'-O-methylguanosine-3'-phosphate
  modified_base 7: mod_base = OTHER; note = 2'-deoxy-2'-fluoroadenosine-3'-phosphate
  modified_base 8: mod_base = OTHER; note = 2'-O-methyladenosine-3'-phosphate
  modified_base 9: mod_base = OTHER; note = 2'-deoxy-2'-fluorouridine-3'-phosphate
  modified_base 10: mod_base = OTHER; note = 2'-deoxy-2'-fluoroadenosine-3'-phosphate
  modified_base 11: mod_base = OTHER; note = 2'-deoxy-2'-fluorouridine-3'-phosphate
  modified_base 12: mod_base = OTHER; note = 2'-O-methylcytidine-3'-phosphate
  modified_base 13: mod_base = OTHER; note = 2'-O-methyluridine-3'-phosphate
  modified_base 14: mod_base = OTHER; note = 2'-O-methylcytidine-3'-phosphate
  modified_base 15: mod_base = OTHER; note = 2'-O-methyluridine-3'-phosphate
  modified_base 16: mod_base = OTHER; note = 2'-O-methyladenosine-3'-phosphate
  modified_base 17: mod_base = OTHER; note = 2'-O-methylcytidine-3'-phosphate
  modified_base 18: mod_base = OTHER; note = 2'-O-methyladenosine-3'-phosphate
  modified_base 19: mod_base = OTHER; note = 2'-O-methyladenosine-3'-phosphate
  modified_base 20: mod_base = OTHER; note = 2'-O-methyladenosine-3'-phosphate
  modified_base 21: mod_base = OTHER; note = 2'-O-methyluridine-3'-phosphate ((2S,4R)-1-[29-[[2-(acetylamino)-2-deoxy-beta-D-galactopyra nosyl]oxy]-14,14-bis[[3-[[3-[[5-[[2-(acetylamino)-2-deoxy-b eta-D-galactopyranosyl]oxy]-1-oxopentyl]amino]propyl]amino] -3-oxopropoxy]methyl]-1,12,19,25-tetraoxo-16-oxa-13,20,24-t riazanonacos-1-yl]-4-hydroxy-2-pyrrolidinyl)methyl ester
atcatgaatatctctacaaat

SEQ ID NO: 786 - RNA, 21 nt, synthetic construct
  source 1..21: mol_type = other RNA
  modified_base 1: mod_base = OTHER; note = 2'-O-methyladenosine-3'-phosphorothioate
  modified_base 2: mod_base = OTHER; note = 2'-O-methyluridine-3'-phosphorothioate
  modified_base 3: mod_base = OTHER; note = 2'-O-methyladenosine-3'-phosphate
  modified_base 4: mod_base = OTHER; note = 2'-O-methyluridine-3'-phosphate
  modified_base 5: mod_base = OTHER; note = 2'-O-methylcytidine-3'-phosphate
  modified_base 6: mod_base = OTHER; note = 2'-O-methyluridine-3'-phosphate
  modified_base 7: mod_base = OTHER; note = 2'-deoxy-2'-fluorocytidine-3'-phosphate
  modified_base 8: mod_base = OTHER; note = 2'-O-methyluridine-3'-phosphate
  modified_base 9: mod_base = OTHER; note = 2'-deoxy-2'-fluoroadenosine-3'-phosphate
  modified_base 10: mod_base = OTHER; note = 2'-deoxy-2'-fluorocytidine-3'-phosphate
  modified_base 11: mod_base = OTHER; note = 2'-deoxy-2'-fluoroadenosine-3'-phosphate
  modified_base 12: mod_base = OTHER; note = 2'-O-methyladenosine-3'-phosphate
  modified_base 13: mod_base = OTHER; note = 2'-O-methyladenosine-3'-phosphate
  modified_base 14: mod_base = OTHER; note = 2'-O-methylcytidine-3'-phosphate
  modified_base 15: mod_base = OTHER; note = 2'-O-methyladenosine-3'-phosphate
  modified_base 16: mod_base = OTHER; note = 2'-O-methyladenosine-3'-phosphate
  modified_base 17: mod_base = OTHER; note = 2'-O-methylguanosine-3'-phosphate
  modified_base 18: mod_base = OTHER; note = 2'-O-methyladenosine-3'-phosphate
  modified_base 19: mod_base = OTHER; note = 2'-O-methyladenosine-3'-phosphate
  modified_base 20: mod_base = OTHER; note = 2'-O-methyladenosine-3'-phosphate
  modified_base 21: mod_base = OTHER; note = 2'-O-methyluridine-3'-phosphate ((2S,4R)-1-[29-[[2-(acetylamino)-2-deoxy-beta-D-galactopyra nosyl]oxy]-14,14-bis[[3-[[3-[[5-[[2-(acetylamino)-2-deoxy-b eta-D-galactopyranosyl]oxy]-1-oxopentyl]amino]propyl]amino] -3-oxopropoxy]methyl]-1,12,19,25-tetraoxo-16-oxa-13,20,24-t riazanonacos-1-yl]-4-hydroxy-2-pyrrolidinyl)methyl ester
atatctctacaaacaagaaat

SEQ ID NO: 787 - RNA, 21 nt, synthetic construct
  source 1..21: mol_type = other RNA
  modified_base 1: mod_base = OTHER; note = 2'-O-methyladenosine-3'-phosphorothioate
  modified_base 2: mod_base = OTHER; note = 2'-O-methyluridine-3'-phosphorothioate
  modified_base 3: mod_base = OTHER; note = 2'-O-methylcytidine-3'-phosphate
  modified_base 4: mod_base = OTHER; note = 2'-O-methyluridine-3'-phosphate
  modified_base 5: mod_base = OTHER; note = 2'-O-methyluridine-3'-phosphate
  modified_base 6: mod_base = OTHER; note = 2'-O-methylguanosine-3'-phosphate
  modified_base 7: mod_base = OTHER; note = 2'-deoxy-2'-fluoroguanosine-3'-phosphate
  modified_base 8: mod_base = OTHER; note = 2'-O-methyluridine-3'-phosphate
  modified_base 9: mod_base = OTHER; note = 2'-deoxy-2'-fluoroadenosine-3'-phosphate
  modified_base 10: mod_base = OTHER; note = 2'-deoxy-2'-fluorouridine-3'-phosphate
  modified_base 11: mod_base = OTHER; note = 2'-deoxy-2'-fluorouridine-3'-phosphate
  modified_base 12: mod_base = OTHER; note = 2'-O-methylcytidine-3'-phosphate
  modified_base 13: mod_base = OTHER; note = 2'-O-methyladenosine-3'-phosphate
  modified_base 14: mod_base = OTHER; note = 2'-O-methyladenosine-3'-phosphate
  modified_base 15: mod_base = OTHER; note = 2'-O-methyluridine-3'-phosphate
  modified_base 16: mod_base = OTHER; note = 2'-O-methylguanosine-3'-phosphate
  modified_base 17: mod_base = OTHER; note = 2'-O-methylcytidine-3'-phosphate
  modified_base 18: mod_base = OTHER; note = 2'-O-methyluridine-3'-phosphate
  modified_base 19: mod_base = OTHER; note = 2'-O-methylguanosine-3'-phosphate
  modified_base 20: mod_base = OTHER; note = 2'-O-methyladenosine-3'-phosphate
  modified_base 21: mod_base = OTHER; note = 2'-O-methyluridine-3'-phosphate ((2S,4R)-1-[29-[[2-(acetylamino)-2-deoxy-beta-D-galactopyra nosyl]oxy]-14,14-bis[[3-[[3-[[5-[[2-(acetylamino)-2-deoxy-b eta-D-galactopyranosyl]oxy]-1-oxopentyl]amino]propyl]amino] -3-oxopropoxy]methyl]-1,12,19,25-tetraoxo-16-oxa-13,20,24-t riazanonacos-1-yl]-4-hydroxy-2-pyrrolidinyl)methyl ester
atcttggtattcaatgctgat

SEQ ID NO: 788 - RNA, 21 nt, synthetic construct
  source 1..21: mol_type = other RNA
  modified_base 1: mod_base = OTHER; note = 2'-O-methylguanosine-3'-phosphorothioate
  modified_base 2: mod_base = OTHER; note = 2'-O-methyluridine-3'-phosphorothioate
  modified_base 3: mod_base = OTHER; note = 2'-O-methyladenosine-3'-phosphate
  modified_base 4: mod_base = OTHER; note = 2'-O-methyluridine-3'-phosphate
  modified_base 5: mod_base = OTHER; note = 2'-O-methyluridine-3'-phosphate
  modified_base 6: mod_base = OTHER; note = 2'-O-methylcytidine-3'-phosphate
  modified_base 7: mod_base = OTHER; note = 2'-deoxy-2'-fluoroadenosine-3'-phosphate
  modified_base 8: mod_base = OTHER; note = 2'-O-methyladenosine-3'-phosphate
  modified_base 9: mod_base = OTHER; note = 2'-deoxy-2'-fluorouridine-3'-phosphate
  modified_base 10: mod_base = OTHER; note = 2'-deoxy-2'-fluoroguanosine-3'-phosphate
  modified_base 11: mod_base = OTHER; note = 2'-deoxy-2'-fluorocytidine-3'-phosphate
  modified_base 12: mod_base = OTHER; note = 2'-O-methyluridine-3'-phosphate
  modified_base 13: mod_base = OTHER; note = 2'-O-methylguanosine-3'-phosphate
  modified_base 14: mod_base = OTHER; note = 2'-O-methyladenosine-3'-phosphate
  modified_base 15: mod_base = OTHER; note = 2'-O-methyladenosine-3'-phosphate
  modified_base 16: mod_base = OTHER; note = 2'-O-methyluridine-3'-phosphate
  modified_base 17: mod_base = OTHER; note = 2'-O-methyladenosine-3'-phosphate
  modified_base 18: mod_base = OTHER; note = 2'-O-methyluridine-3'-phosphate
  modified_base 19: mod_base = OTHER; note = 2'-O-methylguanosine-3'-phosphate
  modified_base 20: mod_base = OTHER; note = 2'-O-methylguanosine-3'-phosphate
  modified_base 21: mod_base = OTHER; note = 2'-O-methyluridine-3'-phosphate ((2S,4R)-1-[29-[[2-(acetylamino)-2-deoxy-beta-D-galactopyra nosyl]oxy]-14,14-bis[[3-[[3-[[5-[[2-(acetylamino)-2-deoxy-b eta-D-galactopyranosyl]oxy]-1-oxopentyl]amino]propyl]amino] -3-oxopropoxy]methyl]-1,12,19,25-tetraoxo-16-oxa-13,20,24-t riazanonacos-1-yl]-4-hydroxy-2-pyrrolidinyl)methyl ester
gtattcaatgctgaatatggt

SEQ ID NO: 789 - RNA, 21 nt, synthetic construct
  source 1..21: mol_type = other RNA
  modified_base 1: mod_base = OTHER; note = 2'-O-methyladenosine-3'-phosphorothioate
  modified_base 2: mod_base = OTHER; note = 2'-O-methyladenosine-3'-phosphorothioate
  modified_base 3: mod_base = OTHER; note = 2'-O-methyluridine-3'-phosphate
  modified_base 4: mod_base = OTHER; note = 2'-O-methylguanosine-3'-phosphate
  modified_base 5: mod_base = OTHER; note = 2'-O-methylcytidine-3'-phosphate
  modified_base 6: mod_base = OTHER; note = 2'-O-methyluridine-3'-phosphate
  modified_base 7: mod_base = OTHER; note = 2'-deoxy-2'-fluoroguanosine-3'-phosphate
  modified_base 8: mod_base = OTHER; note = 2'-O-methyladenosine-3'-phosphate
  modified_base 9: mod_base = OTHER; note = 2'-deoxy-2'-fluoroadenosine-3'-phosphate
  modified_base 10: mod_base = OTHER; note = 2'-deoxy-2'-fluorouridine-3'-phosphate
  modified_base 11: mod_base = OTHER; note = 2'-deoxy-2'-fluoroadenosine-3'-phosphate
  modified_base 12: mod_base = OTHER; note = 2'-O-methyluridine-3'-phosphate
  modified_base 13: mod_base = OTHER; note = 2'-O-methylguanosine-3'-phosphate
  modified_base 14: mod_base = OTHER; note = 2'-O-methylguanosine-3'-phosphate
  modified_base 15: mod_base = OTHER; note = 2'-O-methyladenosine-3'-phosphate
  modified_base 16: mod_base = OTHER; note = 2'-O-methyladenosine-3'-phosphate
  modified_base 17: mod_base = OTHER; note = 2'-O-methyladenosine-3'-phosphate
  modified_base 18: mod_base = OTHER; note = 2'-O-methylcytidine-3'-phosphate
  modified_base 19: mod_base = OTHER; note = 2'-O-methyladenosine-3'-phosphate
  modified_base 20: mod_base = OTHER; note = 2'-O-methylguanosine-3'-phosphate
  modified_base 21: mod_base = OTHER; note = 2'-O-methyluridine-3'-phosphate ((2S,4R)-1-[29-[[2-(acetylamino)-2-deoxy-beta-D-galactopyra nosyl]oxy]-14,14-bis[[3-[[3-[[5-[[2-(acetylamino)-2-deoxy-b eta-D-galactopyranosyl]oxy]-1-oxopentyl]amino]propyl]amino] -3-oxopropoxy]methyl]-1,12,19,25-tetraoxo-16-oxa-13,20,24-t riazanonacos-1-yl]-4-hydroxy-2-pyrrolidinyl)methyl ester
aatgctgaatatggaaacagt

SEQ ID NO: 790 - RNA, 21 nt, synthetic construct
  source 1..21: mol_type = other RNA
  modified_base 1: mod_base = OTHER; note = 2'-O-methyladenosine-3'-phosphorothioate
  modified_base 2: mod_base = OTHER; note = 2'-O-methyladenosine-3'-phosphorothioate
  modified_base 3: mod_base = OTHER; note = 2'-O-methyluridine-3'-phosphate
  modified_base 4: mod_base = OTHER; note = 2'-O-methyladenosine-3'-phosphate
  modified_base 5: mod_base = OTHER; note = 2'-O-methyluridine-3'-phosphate
  modified_base 6: mod_base = OTHER; note = 2'-O-methylguanosine-3'-phosphate
  modified_base 7: mod_base = OTHER; note = 2'-deoxy-2'-fluoroguanosine-3'-phosphate
  modified_base 8: mod_base = OTHER; note = 2'-O-methyladenosine-3'-phosphate
  modified_base 9: mod_base = OTHER; note = 2'-deoxy-2'-fluoroadenosine-3'-phosphate
  modified_base 10: mod_base = OTHER; note = 2'-deoxy-2'-fluoroadenosine-3'-phosphate
  modified_base 11: mod_base = OTHER; note = 2'-deoxy-2'-fluorocytidine-3'-phosphate
  modified_base 12: mod_base = OTHER; note = 2'-O-methyladenosine-3'-phosphate
  modified_base 13: mod_base = OTHER; note = 2'-O-methylguanosine-3'-phosphate
  modified_base 14: mod_base = OTHER; note = 2'-O-methylcytidine-3'-phosphate
  modified_base 15: mod_base = OTHER; note = 2'-O-methyluridine-3'-phosphate
  modified_base 16: mod_base = OTHER; note = 2'-O-methylcytidine-3'-phosphate
  modified_base 17: mod_base = OTHER; note = 2'-O-methyladenosine-3'-phosphate
  modified_base 18: mod_base = OTHER; note = 2'-O-methylguanosine-3'-phosphate
  modified_base 19: mod_base = OTHER; note = 2'-O-methyluridine-3'-phosphate
  modified_base 20: mod_base = OTHER; note = 2'-O-methyluridine-3'-phosphate
  modified_base 21: mod_base = OTHER; note = 2'-O-methyluridine-3'-phosphate ((2S,4R)-1-[29-[[2-(acetylamino)-2-deoxy-beta-D-galactopyra nosyl]oxy]-14,14-bis[[3-[[3-[[5-[[2-(acetylamino)-2-deoxy-b eta-D-galactopyranosyl]oxy]-1-oxopentyl]amino]propyl]amino] -3-oxopropoxy]methyl]-1,12,19,25-tetraoxo-16-oxa-13,20,24-t riazanonacos-1-yl]-4-hydroxy-2-pyrrolidinyl)methyl ester
aatatggaaacagctcagttt

SEQ ID NO: 791 - RNA, 21 nt, synthetic construct
  source 1..21: mol_type = other RNA
  modified_base 1: mod_base = OTHER; note = 2'-O-methylguanosine-3'-phosphorothioate
  modified_base 2: mod_base = OTHER; note = 2'-O-methyladenosine-3'-phosphorothioate
  modified_base 3: mod_base = OTHER; note = 2'-O-methyladenosine-3'-phosphate
  modified_base 4: mod_base = OTHER; note = 2'-O-methyladenosine-3'-phosphate
  modified_base 5: mod_base = OTHER; note = 2'-O-methylcytidine-3'-phosphate
  modified_base 6: mod_base = OTHER; note = 2'-O-methyladenosine-3'-phosphate
  modified_base 7: mod_base = OTHER; note = 2'-deoxy-2'-fluoroguanosine-3'-phosphate
  modified_base 8: mod_base = OTHER; note = 2'-O-methylcytidine-3'-phosphate
  modified_base 9: mod_base = OTHER; note = 2'-deoxy-2'-fluorouridine-3'-phosphate
  modified_base 10: mod_base = OTHER; note = 2'-deoxy-2'-fluorocytidine-3'-phosphate
  modified_base 11: mod_base = OTHER; note = 2'-deoxy-2'-fluoroadenosine-3'-phosphate
  modified_base 12: mod_base = OTHER; note = 2'-O-methylguanosine-3'-phosphate
  modified_base 13: mod_base = OTHER; note = 2'-O-methyluridine-3'-phosphate
  modified_base 14: mod_base = OTHER; note = 2'-O-methyluridine-3'-phosphate
  modified_base 15: mod_base = OTHER; note = 2'-O-methyluridine-3'-phosphate
  modified_base 16: mod_base = OTHER; note = 2'-O-methyluridine-3'-phosphate
  modified_base 17: mod_base = OTHER; note = 2'-O-methylcytidine-3'-phosphate
  modified_base 18: mod_base = OTHER; note = 2'-O-methyluridine-3'-phosphate
  modified_base 19: mod_base = OTHER; note = 2'-O-methyluridine-3'-phosphate
  modified_base 20: mod_base = OTHER; note = 2'-O-methylguanosine-3'-phosphate
  modified_base 21: mod_base = OTHER; note = 2'-O-methyluridine-3'-phosphate ((2S,4R)-1-[29-[[2-(acetylamino)-2-deoxy-beta-D-galactopyra nosyl]oxy]-14,14-bis[[3-[[3-[[5-[[2-(acetylamino)-2-deoxy-b eta-D-galactopyranosyl]oxy]-1-oxopentyl]amino]propyl]amino] -3-oxopropoxy]methyl]-1,12,19,25-tetraoxo-16-oxa-13,20,24-t riazanonacos-1-yl]-4-hydroxy-2-pyrrolidinyl)methyl ester
gaaacagctcagttttcttgt

SEQ ID NO: 792 - RNA, 21 nt, synthetic construct
  source 1..21: mol_type = other RNA
  modified_base 1: mod_base = OTHER; note = 2'-O-methyladenosine-3'-phosphorothioate
  modified_base 2: mod_base = OTHER; note = 2'-O-methylguanosine-3'-phosphorothioate
  modified_base 3: mod_base = OTHER; note = 2'-O-methyluridine-3'-phosphate
  modified_base 4: mod_base = OTHER; note = 2'-O-methyluridine-3'-phosphate
  modified_base 5: mod_base = OTHER; note = 2'-O-methyluridine-3'-phosphate
  modified_base 6: mod_base = OTHER; note = 2'-O-methyluridine-3'-phosphate
  modified_base 7: mod_base = OTHER; note = 2'-deoxy-2'-fluorocytidine-3'-phosphate
  modified_base 8: mod_base = OTHER; note = 2'-O-methyluridine-3'-phosphate
  modified_base 9: mod_base = OTHER; note = 2'-deoxy-2'-fluorouridine-3'-phosphate
  modified_base 10: mod_base = OTHER; note = 2'-deoxy-2'-fluoroguanosine-3'-phosphate
  modified_base 11: mod_base = OTHER; note = 2'-deoxy-2'-fluoroguanosine-3'-phosphate
  modified_base 12: mod_base = OTHER; note = 2'-O-methyladenosine-3'-phosphate
  modified_base 13: mod_base = OTHER; note = 2'-O-methylguanosine-3'-phosphate
  modified_base 14: mod_base = OTHER; note = 2'-O-methyladenosine-3'-phosphate
  modified_base 15: mod_base = OTHER; note = 2'-O-methyladenosine-3'-phosphate
  modified_base 16: mod_base = OTHER; note = 2'-O-methylcytidine-3'-phosphate
  modified_base 17: mod_base = OTHER; note = 2'-O-methyladenosine-3'-phosphate
  modified_base 18: mod_base = OTHER; note = 2'-O-methylguanosine-3'-phosphate
  modified_base 19: mod_base = OTHER; note = 2'-O-methyluridine-3'-phosphate
  modified_base 20: mod_base = OTHER; note = 2'-O-methyladenosine-3'-phosphate
  modified_base 21: mod_base = OTHER; note = 2'-O-methyluridine-3'-phosphate ((2S,4R)-1-[29-[[2-(acetylamino)-2-deoxy-beta-D-galactopyra nosyl]oxy]-14,14-bis[[3-[[3-[[5-[[2-(acetylamino)-2-deoxy-b eta-D-galactopyranosyl]oxy]-1-oxopentyl]amino]propyl]amino] -3-oxopropoxy]methyl]-1,12,19,25-tetraoxo-16-oxa-13,20,24-t riazanonacos-1-yl]-4-hydroxy-2-pyrrolidinyl)methyl ester
agttttcttggagaacagtat

SEQ ID NO: 793 - RNA, 21 nt, synthetic construct
  source 1..21: mol_type = other RNA
  modified_base 1: mod_base = OTHER; note = 2'-O-methylguanosine-3'-phosphorothioate
  modified_base 2: mod_base = OTHER; note = 2'-O-methylguanosine-3'-phosphorothioate
  modified_base 3: mod_base = OTHER; note = 2'-O-methyladenosine-3'-phosphate
  modified_base 4: mod_base = OTHER; note = 2'-O-methylguanosine-3'-phosphate
  modified_base 5: mod_base = OTHER; note = 2'-O-methyladenosine-3'-phosphate
  modified_base 6: mod_base = OTHER; note = 2'-O-methyladenosine-3'-phosphate
  modified_base 7: mod_base = OTHER; note = 2'-deoxy-2'-fluorocytidine-3'-phosphate
  modified_base 8: mod_base = OTHER; note = 2'-O-methyladenosine-3'-phosphate
  modified_base 9: mod_base = OTHER; note = 2'-deoxy-2'-fluoroguanosine-3'-phosphate
  modified_base 10: mod_base = OTHER; note = 2'-deoxy-2'-fluorouridine-3'-phosphate
  modified_base 11: mod_base = OTHER; note = 2'-deoxy-2'-fluoroadenosine-3'-phosphate
  modified_base 12: mod_base = OTHER; note = 2'-O-methylcytidine-3'-phosphate
  modified_base 13: mod_base = OTHER; note = 2'-O-methyladenosine-3'-phosphate
  modified_base 14: mod_base = OTHER; note = 2'-O-methyluridine-3'-phosphate
  modified_base 15: mod_base = OTHER; note = 2'-O-methyluridine-3'-phosphate
  modified_base 16: mod_base = OTHER; note = 2'-O-methyluridine-3'-phosphate
  modified_base 17: mod_base = OTHER; note = 2'-O-methylguanosine-3'-phosphate
  modified_base 18: mod_base = OTHER; note = 2'-O-methyladenosine-3'-phosphate
  modified_base 19: mod_base = OTHER; note = 2'-O-methyluridine-3'-phosphate
  modified_base 20: mod_base = OTHER; note = 2'-O-methylguanosine-3'-phosphate
  modified_base 21: mod_base = OTHER; note = 2'-O-methyluridine-3'-phosphate ((2S,4R)-1-[29-[[2-(acetylamino)-2-deoxy-beta-D-galactopyra nosyl]oxy]-14,14-bis[[3-[[3-[[5-[[2-(acetylamino)-2-deoxy-b eta-D-galactopyranosyl]oxy]-1-oxopentyl]amino]propyl]amino] -3-oxopropoxy]methyl]-1,12,19,25-tetraoxo-16-oxa-13,20,24-t riazanonacos-1-yl]-4-hydroxy-2-pyrrolidinyl)methyl ester
ggagaacagtacatttgatgt

SEQ ID NO: 794 - RNA, 21 nt, synthetic construct
  source 1..21: mol_type = other RNA
  modified_base 1: mod_base = OTHER; note = 2'-O-methylcytidine-3'-phosphorothioate
  modified_base 2: mod_base = OTHER; note = 2'-O-methyladenosine-3'-phosphorothioate
  modified_base 3: mod_base = OTHER; note = 2'-O-methylguanosine-3'-phosphate
  modified_base 4: mod_base = OTHER; note = 2'-O-methyluridine-3'-phosphate
  modified_base 5: mod_base = OTHER; note = 2'-O-methyladenosine-3'-phosphate
  modified_base 6: mod_base = OTHER; note = 2'-O-methylcytidine-3'-phosphate
  modified_base 7: mod_base = OTHER; note = 2'-deoxy-2'-fluoroadenosine-3'-phosphate
  modified_base 8: mod_base = OTHER; note = 2'-O-methyluridine-3'-phosphate
  modified_base 9: mod_base = OTHER; note = 2'-deoxy-2'-fluorouridine-3'-phosphate
  modified_base 10: mod_base = OTHER; note = 2'-deoxy-2'-fluorouridine-3'-phosphate
  modified_base 11: mod_base = OTHER; note = 2'-deoxy-2'-fluoroguanosine-3'-phosphate
  modified_base 12: mod_base = OTHER; note = 2'-O-methyladenosine-3'-phosphate
  modified_base 13: mod_base = OTHER; note = 2'-O-methyluridine-3'-phosphate
  modified_base 14: mod_base = OTHER; note = 2'-O-methylguanosine-3'-phosphate
  modified_base 15: mod_base = OTHER; note = 2'-O-methyladenosine-3'-phosphate
  modified_base 16: mod_base = OTHER; note = 2'-O-methylguanosine-3'-phosphate
  modified_base 17: mod_base = OTHER; note = 2'-O-methyluridine-3'-phosphate
  modified_base 18: mod_base = OTHER; note = 2'-O-methyluridine-3'-phosphate
  modified_base 19: mod_base = OTHER; note = 2'-O-methyluridine-3'-phosphate
  modified_base 20: mod_base = OTHER; note = 2'-O-methylguanosine-3'-phosphate
  modified_base 21: mod_base = OTHER; note = 2'-O-methyluridine-3'-phosphate ((2S,4R)-1-[29-[[2-(acetylamino)-2-deoxy-beta-D-galactopyra nosyl]oxy]-14,14-bis[[3-[[3-[[5-[[2-(acetylamino)-2-deoxy-b eta-D-galactopyranosyl]oxy]-1-oxopentyl]amino]propyl]amino] -3-oxopropoxy]methyl]-1,12,19,25-tetraoxo-16-oxa-13,20,24-t riazanonacos-1-yl]-4-hydroxy-2-pyrrolidinyl)methyl ester
cagtacatttgatgagtttgt

SEQ ID NO: 795 - RNA, 21 nt, synthetic construct
  source 1..21: mol_type = other RNA
  modified_base 1: mod_base = OTHER; note = 2'-O-methyluridine-3'-phosphorothioate
  modified_base 2: mod_base = OTHER; note = 2'-O-methyluridine-3'-phosphorothioate
  modified_base 3: mod_base = OTHER; note = 2'-O-methylguanosine-3'-phosphate
  modified_base 4: mod_base = OTHER; note = 2'-O-methyladenosine-3'-phosphate
  modified_base 5: mod_base = OTHER; note = 2'-O-methyluridine-3'-phosphate
  modified_base 6: mod_base = OTHER; note = 2'-O-methylguanosine-3'-phosphate
  modified_base 7: mod_base = OTHER; note = 2'-deoxy-2'-fluoroadenosine-3'-phosphate
  modified_base 8: mod_base = OTHER; note = 2'-O-methylguanosine-3'-phosphate
  modified_base 9: mod_base = OTHER; note = 2'-deoxy-2'-fluorouridine-3'-phosphate
  modified_base 10: mod_base = OTHER; note = 2'-deoxy-2'-fluorouridine-3'-phosphate
  modified_base 11: mod_base = OTHER; note = 2'-deoxy-2'-fluorouridine-3'-phosphate
  modified_base 12: mod_base = OTHER; note = 2'-O-methylguanosine-3'-phosphate
  modified_base 13: mod_base = OTHER; note = 2'-O-methylguanosine-3'-phosphate
  modified_base 14: mod_base = OTHER; note = 2'-O-methyladenosine-3'-phosphate
  modified_base 15: mod_base = OTHER; note = 2'-O-methylcytidine-3'-phosphate
  modified_base 16: mod_base = OTHER; note = 2'-O-methyladenosine-3'-phosphate
  modified_base 17: mod_base = OTHER; note = 2'-O-methyluridine-3'-phosphate
  modified_base 18: mod_base = OTHER; note = 2'-O-methyluridine-3'-phosphate
  modified_base 19: mod_base = OTHER; note = 2'-O-methylcytidine-3'-phosphate
  modified_base 20: mod_base = OTHER; note = 2'-O-methyluridine-3'-phosphate
  modified_base 21: mod_base = OTHER; note = 2'-O-methyluridine-3'-phosphate ((2S,4R)-1-[29-[[2-(acetylamino)-2-deoxy-beta-D-galactopyra nosyl]oxy]-14,14-bis[[3-[[3-[[5-[[2-(acetylamino)-2-deoxy-b eta-D-galactopyranosyl]oxy]-1-oxopentyl]amino]propyl]amino] -3-oxopropoxy]methyl]-1,12,19,25-tetraoxo-16-oxa-13,20,24-t riazanonacos-1-yl]-4-hydroxy-2-pyrrolidinyl)methyl ester
ttgatgagtttggacattctt

SEQ ID NO: 796 - RNA, 21 nt, synthetic construct
  source 1..21: mol_type = other RNA
  modified_base 1: mod_base = OTHER; note = 2'-O-methyladenosine-3'-phosphorothioate
  modified_base 2: mod_base = OTHER; note = 2'-O-methylguanosine-3'-phosphorothioate
  modified_base 3: mod_base = OTHER; note = 2'-O-methyluridine-3'-phosphate
  modified_base 4: mod_base = OTHER; note = 2'-O-methyluridine-3'-phosphate
  modified_base 5: mod_base = OTHER; note = 2'-O-methyluridine-3'-phosphate
  modified_base 6: mod_base = OTHER; note = 2'-O-methylguanosine-3'-phosphate
  modified_base 7: mod_base = OTHER; note = 2'-deoxy-2'-fluoroguanosine-3'-phosphate
  modified_base 8: mod_base = OTHER; note = 2'-O-methyladenosine-3'-phosphate
  modified_base 9: mod_base = OTHER; note = 2'-deoxy-2'-fluorocytidine-3'-phosphate
  modified_base 10: mod_base = OTHER; note = 2'-deoxy-2'-fluoroadenosine-3'-phosphate
  modified_base 11: mod_base = OTHER; note = 2'-deoxy-2'-fluorouridine-3'-phosphate
  modified_base 12: mod_base = OTHER; note = 2'-O-methyluridine-3'-phosphate
  modified_base 13: mod_base = OTHER; note = 2'-O-methylcytidine-3'-phosphate
  modified_base 14: mod_base = OTHER; note = 2'-O-methyluridine-3'-phosphate
  modified_base 15: mod_base = OTHER; note = 2'-O-methyladenosine-3'-phosphate
  modified_base 16: mod_base = OTHER; note = 2'-O-methyluridine-3'-phosphate
  modified_base 17: mod_base = OTHER; note = 2'-O-methylcytidine-3'-phosphate
  modified_base 18: mod_base = OTHER; note = 2'-O-methyladenosine-3'-phosphate
  modified_base 19: mod_base = OTHER; note = 2'-O-methyladenosine-3'-phosphate
  modified_base 20: mod_base = OTHER; note = 2'-O-methyluridine-3'-phosphate
  modified_base 21: mod_base = OTHER; note = 2'-O-methyluridine-3'-phosphate ((2S,4R)-1-[29-[[2-(acetylamino)-2-deoxy-beta-D-galactopyra nosyl]oxy]-14,14-bis[[3-[[3-[[5-[[2-(acetylamino)-2-deoxy-b eta-D-galactopyranosyl]oxy]-1-oxopentyl]amino]propyl]amino] -3-oxopropoxy]methyl]-1,12,19,25-tetraoxo-16-oxa-13,20,24-t riazanonacos-1-yl]-4-hydroxy-2-pyrrolidinyl)methyl ester
agtttggacattctatcaatt

SEQ ID NO: 797 - RNA, 21 nt, synthetic construct
  source 1..21: mol_type = other RNA
  modified_base 1: mod_base = OTHER; note = 2'-O-methylguanosine-3'-phosphorothioate
  modified_base 2: mod_base = OTHER; note = 2'-O-methyladenosine-3'-phosphorothioate
  modified_base 3: mod_base = OTHER; note = 2'-O-methylcytidine-3'-phosphate
  modified_base 4: mod_base = OTHER; note = 2'-O-methyladenosine-3'-phosphate
  modified_base 5: mod_base = OTHER; note = 2'-O-methyluridine-3'-phosphate
  modified_base 6: mod_base = OTHER; note = 2'-O-methyluridine-3'-phosphate
  modified_base 7: mod_base = OTHER; note = 2'-deoxy-2'-fluorocytidine-3'-phosphate
  modified_base 8: mod_base = OTHER; note = 2'-O-methyluridine-3'-phosphate
  modified_base 9: mod_base = OTHER; note = 2'-deoxy-2'-fluoroadenosine-3'-phosphate
  modified_base 10: mod_base = OTHER; note = 2'-deoxy-2'-fluorouridine-3'-phosphate
  modified_base 11: mod_base = OTHER; note = 2'-deoxy-2'-fluorocytidine-3'-phosphate
  modified_base 12: mod_base = OTHER; note = 2'-O-methyladenosine-3'-phosphate
  modified_base 13: mod_base = OTHER; note = 2'-O-methyladenosine-3'-phosphate
  modified_base 14: mod_base = OTHER; note = 2'-O-methyluridine-3'-phosphate
  modified_base 15: mod_base = OTHER; note = 2'-O-methylguanosine-3'-phosphate
  modified_base 16: mod_base = OTHER; note = 2'-O-methyladenosine-3'-phosphate
  modified_base 17: mod_base = OTHER; note = 2'-O-methyluridine-3'-phosphate
  modified_base 18: mod_base = OTHER; note = 2'-O-methyluridine-3'-phosphate
  modified_base 19: mod_base = OTHER; note = 2'-O-methyladenosine-3'-phosphate
  modified_base 20: mod_base = OTHER; note = 2'-O-methyluridine-3'-phosphate
  modified_base 21: mod_base = OTHER; note = 2'-O-methyluridine-3'-phosphate ((2S,4R)-1-[29-[[2-(acetylamino)-2-deoxy-beta-D-galactopyra nosyl]oxy]-14,14-bis[[3-[[3-[[5-[[2-(acetylamino)-2-deoxy-b eta-D-galactopyranosyl]oxy]-1-oxopentyl]amino]propyl]amino] -3-oxopropoxy]methyl]-1,12,19,25-tetraoxo-16-oxa-13,20,24-t riazanonacos-1-yl]-4-hydroxy-2-pyrrolidinyl)methyl ester
gacattctatcaatgattatt

SEQ ID NO: 798 - RNA, 21 nt, synthetic construct
  source 1..21: mol_type = other RNA
  modified_base 1: mod_base = OTHER; note = 2'-O-methyladenosine-3'-phosphorothioate
  modified_base 2: mod_base = OTHER; note = 2'-O-methyluridine-3'-phosphorothioate
  modified_base 3: mod_base = OTHER; note = 2'-O-methylguanosine-3'-phosphate
  modified_base 4: mod_base = OTHER; note = 2'-O-methyladenosine-3'-phosphate
  modified_base 5: mod_base = OTHER; note = 2'-O-methyluridine-3'-phosphate
  modified_base 6: mod_base = OTHER; note = 2'-O-methyluridine-3'-phosphate
  modified_base 7: mod_base = OTHER; note = 2'-deoxy-2'-fluoroadenosine-3'-phosphate
  modified_base 8: mod_base = OTHER; note = 2'-O-methyluridine-3'-phosphate
  modified_base 9: mod_base = OTHER; note = 2'-deoxy-2'-fluorouridine-3'-phosphate
  modified_base 10: mod_base = OTHER; note = 2'-deoxy-2'-fluorocytidine-3'-phosphate
  modified_base 11: mod_base = OTHER; note = 2'-deoxy-2'-fluoroadenosine-3'-phosphate
  modified_base 12: mod_base = OTHER; note = 2'-O-methyladenosine-3'-phosphate
  modified_base 13: mod_base = OTHER; note = 2'-O-methyluridine-3'-phosphate
  modified_base 14: mod_base = OTHER; note = 2'-O-methyladenosine-3'-phosphate
  modified_base 15: mod_base = OTHER; note = 2'-O-methyluridine-3'-phosphate
  modified_base 16: mod_base = OTHER; note = 2'-O-methylcytidine-3'-phosphate
  modified_base 17: mod_base = OTHER; note = 2'-O-methyluridine-3'-phosphate
  modified_base 18: mod_base = OTHER; note = 2'-O-methylcytidine-3'-phosphate
  modified_base 19: mod_base = OTHER; note = 2'-O-methylcytidine-3'-phosphate
  modified_base 20: mod_base = OTHER; note = 2'-O-methyluridine-3'-phosphate
  modified_base 21: mod_base = OTHER; note = 2'-O-methyluridine-3'-phosphate ((2S,4R)-1-[29-[[2-(acetylamino)-2-deoxy-beta-D-galactopyra nosyl]oxy]-14,14-bis[[3-[[3-[[5-[[2-(acetylamino)-2-deoxy-b eta-D-galactopyranosyl]oxy]-1-oxopentyl]amino]propyl]amino] -3-oxopropoxy]methyl]-1,12,19,25-tetraoxo-16-oxa-13,20,24-t riazanonacos-1-yl]-4-hydroxy-2-pyrrolidinyl)methyl ester
atgattattcaatatctcctt

SEQ ID NO: 799 - RNA, 21 nt, synthetic construct
  source 1..21: mol_type = other RNA
  modified_base 1: mod_base = OTHER; note = 2'-O-methylcytidine-3'-phosphorothioate
  modified_base 2: mod_base = OTHER; note = 2'-O-methylcytidine-3'-phosphorothioate
  modified_base 3: mod_base = OTHER; note = 2'-O-methyluridine-3'-phosphate
  modified_base 4: mod_base = OTHER; note = 2'-O-methylguanosine-3'-phosphate
  modified_base 5: mod_base = OTHER; note = 2'-O-methyladenosine-3'-phosphate
  modified_base 6: mod_base = OTHER; note = 2'-O-methyluridine-3'-phosphate
  modified_base 7: mod_base = OTHER; note = 2'-deoxy-2'-fluoroguanosine-3'-phosphate
  modified_base 8: mod_base = OTHER; note = 2'-O-methylguanosine-3'-phosphate
  modified_base 9: mod_base = OTHER; note = 2'-deoxy-2'-fluoroguanosine-3'-phosphate
  modified_base 10: mod_base = OTHER; note = 2'-deoxy-2'-fluorocytidine-3'-phosphate
  modified_base 11: mod_base = OTHER; note = 2'-deoxy-2'-fluoroadenosine-3'-phosphate
  modified_base 12: mod_base = OTHER; note = 2'-O-methylguanosine-3'-phosphate
  modified_base 13: mod_base = OTHER; note = 2'-O-methyluridine-3'-phosphate
  modified_base 14: mod_base = OTHER; note = 2'-O-methyluridine-3'-phosphate
  modified_base 15: mod_base = OTHER; note = 2'-O-methyluridine-3'-phosphate
  modified_base 16: mod_base = OTHER; note = 2'-O-methyladenosine-3'-phosphate
  modified_base 17: mod_base = OTHER; note = 2'-O-methyluridine-3'-phosphate
  modified_base 18: mod_base = OTHER; note = 2'-O-methyluridine-3'-phosphate
  modified_base 19: mod_base = OTHER; note = 2'-O-methylcytidine-3'-phosphate
  modified_base 20: mod_base = OTHER; note = 2'-O-methyluridine-3'-phosphate
  modified_base 21: mod_base = OTHER; note = 2'-O-methyluridine-3'-phosphate ((2S,4R)-1-[29-[[2-(acetylamino)-2-deoxy-beta-D-galactopyra nosyl]oxy]-14,14-bis[[3-[[3-[[5-[[2-(acetylamino)-2-deoxy-b eta-D-galactopyranosyl]oxy]-1-oxopentyl]amino]propyl]amino] -3-oxopropoxy]methyl]-1,12,19,25-tetraoxo-16-oxa-13,20,24-t riazanonacos-1-yl]-4-hydroxy-2-pyrrolidinyl)methyl ester
cctgatgggcagtttattctt

SEQ ID NO: 800 - RNA, 21 nt, synthetic construct
  source 1..21: mol_type = other RNA
  modified_base 1: mod_base = OTHER; note = 2'-O-methylguanosine-3'-phosphorothioate
  modified_base 2: mod_base = OTHER; note = 2'-O-methylcytidine-3'-phosphorothioate
  modified_base 3: mod_base = OTHER; note = 2'-O-methyladenosine-3'-phosphate
  modified_base 4: mod_base = OTHER; note = 2'-O-methylguanosine-3'-phosphate
  modified_base 5: mod_base = OTHER; note = 2'-O-methyluridine-3'-phosphate
  modified_base 6: mod_base = OTHER; note = 2'-O-methyluridine-3'-phosphate
  modified_base 7: mod_base = OTHER; note = 2'-deoxy-2'-fluorouridine-3'-phosphate
  modified_base 8: mod_base = OTHER; note = 2'-O-methyladenosine-3'-phosphate
  modified_base 9: mod_base = OTHER; note = 2'-deoxy-2'-fluorouridine-3'-phosphate
  modified_base 10: mod_base = OTHER; note = 2'-deoxy-2'-fluorouridine-3'-phosphate
  modified_base 11: mod_base = OTHER; note = 2'-deoxy-2'-fluorocytidine-3'-phosphate
  modified_base 12: mod_base = OTHER; note = 2'-O-methyluridine-3'-phosphate
  modified_base 13: mod_base = OTHER; note = 2'-O-methylcytidine-3'-phosphate
  modified_base 14: mod_base = OTHER; note = 2'-O-methyluridine-3'-phosphate
  modified_base 15: mod_base = OTHER; note = 2'-O-methyluridine-3'-phosphate
  modified_base 16: mod_base = OTHER; note = 2'-O-methyladenosine-3'-phosphate
  modified_base 17: mod_base = OTHER; note = 2'-O-methylguanosine-3'-phosphate
  modified_base 18: mod_base = OTHER; note = 2'-O-methyladenosine-3'-phosphate
  modified_base 19: mod_base = OTHER; note = 2'-O-methyladenosine-3'-phosphate
  modified_base 20: mod_base = OTHER; note = 2'-O-methyluridine-3'-phosphate
  modified_base 21: mod_base = OTHER; note = 2'-O-methyluridine-3'-phosphate ((2S,4R)-1-[29-[[2-(acetylamino)-2-deoxy-beta-D-galactopyra nosyl]oxy]-14,14-bis[[3-[[3-[[5-[[2-(acetylamino)-2-deoxy-b eta-D-galactopyranosyl]oxy]-1-oxopentyl]amino]propyl]amino] -3-oxopropoxy]methyl]-1,12,19,25-tetraoxo-16-oxa-13,20,24-t riazanonacos-1-yl]-4-hydroxy-2-pyrrolidinyl)methyl ester
gcagtttattctcttagaatt

SEQ ID NO: 801 - RNA, 21 nt, synthetic construct
  source 1..21: mol_type = other RNA
  modified_base 1: mod_base = OTHER; note = 2'-O-methylcytidine-3'-phosphorothioate
  modified_base 2: mod_base = OTHER; note = 2'-O-methyluridine-3'-phosphorothioate
  modified_base 3: mod_base = OTHER; note = 2'-O-methylcytidine-3'-phosphate
  modified_base 4: mod_base = OTHER; note = 2'-O-methyluridine-3'-phosphate
  modified_base 5: mod_base = OTHER; note = 2'-O-methyluridine-3'-phosphate
  modified_base 6: mod_base = OTHER; note = 2'-O-methyladenosine-3'-phosphate
  modified_base 7: mod_base = OTHER; note = 2'-deoxy-2'-fluoroguanosine-3'-phosphate
  modified_base 8: mod_base = OTHER; note = 2'-O-methyladenosine-3'-phosphate
  modified_base 9: mod_base = OTHER; note = 2'-deoxy-2'-fluoroadenosine-3'-phosphate
  modified_base 10: mod_base = OTHER; note = 2'-deoxy-2'-fluorouridine-3'-phosphate
  modified_base 11: mod_base = OTHER; note = 2'-deoxy-2'-fluoroadenosine-3'-phosphate
  modified_base 12: mod_base = OTHER; note = 2'-O-methylcytidine-3'-phosphate
  modified_base 13: mod_base = OTHER; note = 2'-O-methyladenosine-3'-phosphate
  modified_base 14: mod_base = OTHER; note = 2'-O-methyladenosine-3'-phosphate
  modified_base 15: mod_base = OTHER; note = 2'-O-methylcytidine-3'-phosphate
  modified_base 16: mod_base = OTHER; note = 2'-O-methyluridine-3'-phosphate
  modified_base 17: mod_base = OTHER; note = 2'-O-methyladenosine-3'-phosphate
  modified_base 18: mod_base = OTHER; note = 2'-O-methylcytidine-3'-phosphate
  modified_base 19: mod_base = OTHER; note = 2'-O-methylguanosine-3'-phosphate
  modified_base 20: mod_base = OTHER; note = 2'-O-methyluridine-3'-phosphate
  modified_base 21: mod_base = OTHER; note = 2'-O-methyluridine-3'-phosphate ((2S,4R)-1-[29-[[2-(acetylamino)-2-deoxy-beta-D-galactopyra nosyl]oxy]-14,14-bis[[3-[[3-[[5-[[2-(acetylamino)-2-deoxy-b eta-D-galactopyranosyl]oxy]-1-oxopentyl]amino]propyl]amino] -3-oxopropoxy]methyl]-1,12,19,25-tetraoxo-16-oxa-13,20,24-t riazanonacos-1-yl]-4-hydroxy-2-pyrrolidinyl)methyl ester
ctcttagaatacaactacgtt

SEQ ID NO: 802 - RNA, 21 nt, synthetic construct
  source 1..21: mol_type = other RNA
  modified_base 1: mod_base = OTHER; note = 2'-O-methyladenosine-3'-phosphorothioate
  modified_base 2: mod_base = OTHER; note = 2'-O-methyluridine-3'-phosphorothioate
  modified_base 3: mod_base = OTHER; note = 2'-O-methyladenosine-3'-phosphate
  modified_base 4: mod_base = OTHER; note = 2'-O-methylcytidine-3'-phosphate
  modified_base 5: mod_base = OTHER; note = 2'-O-methyladenosine-3'-phosphate
  modified_base 6: mod_base = OTHER; note = 2'-O-methyladenosine-3'-phosphate
  modified_base 7: mod_base = OTHER; note = 2'-deoxy-2'-fluorocytidine-3'-phosphate
  modified_base 8: mod_base = OTHER; note = 2'-O-methyluridine-3'-phosphate
  modified_base 9: mod_base = OTHER; note = 2'-deoxy-2'-fluoroadenosine-3'-phosphate
  modified_base 10: mod_base = OTHER; note = 2'-deoxy-2'-fluorocytidine-3'-phosphate
  modified_base 11: mod_base = OTHER; note = 2'-deoxy-2'-fluoroguanosine-3'-phosphate
  modified_base 12: mod_base = OTHER; note = 2'-O-methyluridine-3'-phosphate
  modified_base 13: mod_base = OTHER; note = 2'-O-methylguanosine-3'-phosphate
  modified_base 14: mod_base = OTHER; note = 2'-O-methyladenosine-3'-phosphate
  modified_base 15: mod_base = OTHER; note = 2'-O-methyladenosine-3'-phosphate
  modified_base 16: mod_base = OTHER; note = 2'-O-methylguanosine-3'-phosphate
  modified_base 17: mod_base = OTHER; note = 2'-O-methylcytidine-3'-phosphate
  modified_base 18: mod_base = OTHER; note = 2'-O-methyladenosine-3'-phosphate
  modified_base 19: mod_base = OTHER; note = 2'-O-methyladenosine-3'-phosphate
  modified_base 20: mod_base = OTHER; note = 2'-O-methyluridine-3'-phosphate
  modified_base 21: mod_base = OTHER; note = 2'-O-methyluridine-3'-phosphate ((2S,4R)-1-[29-[[2-(acetylamino)-2-deoxy-beta-D-galactopyra nosyl]oxy]-14,14-bis[[3-[[3-[[5-[[2-(acetylamino)-2-deoxy-b eta-D-galactopyranosyl]oxy]-1-oxopentyl]amino]propyl]amino] -3-oxopropoxy]methyl]-1,12,19,25-tetraoxo-16-oxa-13,20,24-t riazanonacos-1-yl]-4-hydroxy-2-pyrrolidinyl)methyl ester
atacaactacgtgaagcaatt

SEQ ID NO: 803 - RNA, 21 nt, synthetic construct
  source 1..21: mol_type = other RNA
  modified_base 1: mod_base = OTHER; note = 2'-O-methylcytidine-3'-phosphorothioate
  modified_base 2: mod_base = OTHER; note = 2'-O-methylguanosine-3'-phosphorothioate
  modified_base 3: mod_base = OTHER; note = 2'-O-methyluridine-3'-phosphate
  modified_base 4: mod_base = OTHER; note = 2'-O-methylguanosine-3'-phosphate
  modified_base 5: mod_base = OTHER; note = 2'-O-methyladenosine-3'-phosphate
  modified_base 6: mod_base = OTHER; note = 2'-O-methyladenosine-3'-phosphate
  modified_base 7: mod_base = OTHER; note = 2'-deoxy-2'-fluoroguanosine-3'-phosphate
  modified_base 8: mod_base = OTHER; note = 2'-O-methylcytidine-3'-phosphate
  modified_base 9: mod_base = OTHER; note = 2'-deoxy-2'-fluoroadenosine-3'-phosphate
  modified_base 10: mod_base = OTHER; note = 2'-deoxy-2'-fluoroadenosine-3'-phosphate
  modified_base 11: mod_base = OTHER; note = 2'-deoxy-2'-fluorouridine-3'-phosphate
  modified_base 12: mod_base = OTHER; note = 2'-O-methylguanosine-3'-phosphate
  modified_base 13: mod_base = OTHER; note = 2'-O-methylguanosine-3'-phosphate
  modified_base 14: mod_base = OTHER; note = 2'-O-methyladenosine-3'-phosphate
  modified_base 15: mod_base = OTHER; note = 2'-O-methylguanosine-3'-phosphate
  modified_base 16: mod_base = OTHER; note = 2'-O-methylguanosine-3'-phosphate
  modified_base 17: mod_base = OTHER; note = 2'-O-methylcytidine-3'-phosphate
  modified_base 18: mod_base = OTHER; note = 2'-O-methyladenosine-3'-phosphate
  modified_base 19: mod_base = OTHER; note = 2'-O-methyluridine-3'-phosphate
  modified_base 20: mod_base = OTHER; note = 2'-O-methyluridine-3'-phosphate
  modified_base 21: mod_base = OTHER; note = 2'-O-methyluridine-3'-phosphate ((2S,4R)-1-[29-[[2-(acetylamino)-2-deoxy-beta-D-galactopyra nosyl]oxy]-14,14-bis[[3-[[3-[[5-[[2-(acetylamino)-2-deoxy-b eta-D-galactopyranosyl]oxy]-1-oxopentyl]amino]propyl]amino] -3-oxopropoxy]methyl]-1,12,19,25-tetraoxo-16-oxa-13,20,24-t riazanonacos-1-yl]-4-hydroxy-2-pyrrolidinyl)methyl ester
cgtgaagcaatggaggcattt

SEQ ID NO: 804 - RNA, 21 nt, synthetic construct
  source 1..21: mol_type = other RNA
  modified_base 1: mod_base = OTHER; note = 2'-O-methylguanosine-3'-phosphorothioate
  modified_base 2: mod_base = OTHER; note = 2'-O-methyladenosine-3'-phosphorothioate
  modified_base 3: mod_base = OTHER; note = 2'-O-methylguanosine-3'-phosphate
  modified_base 4: mod_base = OTHER; note = 2'-O-methylguanosine-3'-phosphate
  modified_base 5: mod_base = OTHER; note = 2'-O-methylcytidine-3'-phosphate
  modified_base 6: mod_base = OTHER; note = 2'-O-methyladenosine-3'-phosphate
  modified_base 7: mod_base = OTHER; note = 2'-deoxy-2'-fluorouridine-3'-phosphate
  modified_base 8: mod_base = OTHER; note = 2'-O-methyluridine-3'-phosphate
  modified_base 9: mod_base = OTHER; note = 2'-deoxy-2'-fluorocytidine-3'-phosphate
  modified_base 10: mod_base = OTHER; note = 2'-deoxy-2'-fluorocytidine-3'-phosphate
  modified_base 11: mod_base = OTHER; note = 2'-deoxy-2'-fluorouridine-3'-phosphate
  modified_base 12: mod_base = OTHER; note = 2'-O-methyladenosine-3'-phosphate
  modified_base 13: mod_base = OTHER; note = 2'-O-methylcytidine-3'-phosphate
  modified_base 14: mod_base = OTHER; note = 2'-O-methyladenosine-3'-phosphate
  modified_base 15: mod_base = OTHER; note = 2'-O-methylcytidine-3'-phosphate
  modified_base 16: mod_base = OTHER; note = 2'-O-methyladenosine-3'-phosphate
  modified_base 17: mod_base = OTHER; note = 2'-O-methylguanosine-3'-phosphate
  modified_base 18: mod_base = OTHER; note = 2'-O-methylcytidine-3'-phosphate
  modified_base 19: mod_base = OTHER; note = 2'-O-methyluridine-3'-phosphate
  modified_base 20: mod_base = OTHER; note = 2'-O-methyluridine-3'-phosphate
  modified_base 21: mod_base = OTHER; note = 2'-O-methyluridine-3'-phosphate ((2S,4R)-1-[29-[[2-(acetylamino)-2-deoxy-beta-D-galactopyra nosyl]oxy]-14,14-bis[[3-[[3-[[5-[[2-(acetylamino)-2-deoxy-b eta-D-galactopyranosyl]oxy]-1-oxopentyl]amino]propyl]amino] -3-oxopropoxy]methyl]-1,12,19,25-tetraoxo-16-oxa-13,20,24-t riazanonacos-1-yl]-4-hydroxy-2-pyrrolidinyl)methyl ester
gaggcattcctacacagcttt

SEQ ID NO: 805 - RNA, 21 nt, synthetic construct
  source 1..21: mol_type = other RNA
  modified_base 1: mod_base = OTHER; note = 2'-O-methyluridine-3'-phosphorothioate
  modified_base 2: mod_base = OTHER; note = 2'-O-methyluridine-3'-phosphorothioate
  modified_base 3: mod_base = OTHER; note = 2'-O-methylcytidine-3'-phosphate
  modified_base 4: mod_base = OTHER; note = 2'-O-methylcytidine-3'-phosphate
  modified_base 5: mod_base = OTHER; note = 2'-O-methyluridine-3'-phosphate
  modified_base 6: mod_base = OTHER; note = 2'-O-methyladenosine-3'-phosphate
  modified_base 7: mod_base = OTHER; note = 2'-deoxy-2'-fluorocytidine-3'-phosphate
  modified_base 8: mod_base = OTHER; note = 2'-O-methyladenosine-3'-phosphate
  modified_base 9: mod_base = OTHER; note = 2'-deoxy-2'-fluorocytidine-3'-phosphate
  modified_base 10: mod_base = OTHER; note = 2'-deoxy-2'-fluoroadenosine-3'-phosphate
  modified_base 11: mod_base = OTHER; note = 2'-deoxy-2'-fluoroguanosine-3'-phosphate
  modified_base 12: mod_base = OTHER; note = 2'-O-methylcytidine-3'-phosphate
  modified_base 13: mod_base = OTHER; note = 2'-O-methyluridine-3'-phosphate
  modified_base 14: mod_base = OTHER; note = 2'-O-methyluridine-3'-phosphate
  modified_base 15: mod_base = OTHER; note = 2'-O-methylcytidine-3'-phosphate
  modified_base 16: mod_base = OTHER; note = 2'-O-methyladenosine-3'-phosphate
  modified_base 17: mod_base = OTHER; note = 2'-O-methyluridine-3'-phosphate
  modified_base 18: mod_base = OTHER; note = 2'-O-methyladenosine-3'-phosphate
  modified_base 19: mod_base = OTHER; note = 2'-O-methyluridine-3'-phosphate
  modified_base 20: mod_base = OTHER; note = 2'-O-methylguanosine-3'-phosphate
  modified_base 21: mod_base = OTHER; note = 2'-O-methyluridine-3'-phosphate ((2S,4R)-1-[29-[[2-(acetylamino)-2-deoxy-beta-D-galactopyra nosyl]oxy]-14,14-bis[[3-[[3-[[5-[[2-(acetylamino)-2-deoxy-b eta-D-galactopyranosyl]oxy]-1-oxopentyl]amino]propyl]amino] -3-oxopropoxy]methyl]-1,12,19,25-tetraoxo-16-oxa-13,20,24-t riazanonacos-1-yl]-4-hydroxy-2-pyrrolidinyl)methyl ester
ttcctacacagcttcatatgt

SEQ ID NO: 806 - RNA, 21 nt, synthetic construct
  source 1..21: mol_type = other RNA
  modified_base 1: mod_base = OTHER; note = 2'-O-methylcytidine-3'-phosphorothioate
  modified_base 2: mod_base = OTHER; note = 2'-O-methyladenosine-3'-phosphorothioate
  modified_base 3: mod_base = OTHER; note = 2'-O-methylcytidine-3'-phosphate
  modified_base 4: mod_base = OTHER; note = 2'-O-methyladenosine-3'-phosphate
  modified_base 5: mod_base = OTHER; note = 2'-O-methylguanosine-3'-phosphate
  modified_base 6: mod_base = OTHER; note = 2'-O-methylcytidine-3'-phosphate
  modified_base 7: mod_base = OTHER; note = 2'-deoxy-2'-fluorouridine-3'-phosphate
  modified_base 8: mod_base = OTHER; note = 2'-O-methyluridine-3'-phosphate
  modified_base 9: mod_base = OTHER; note = 2'-deoxy-2'-fluorocytidine-3'-phosphate
  modified_base 10: mod_base = OTHER; note = 2'-deoxy-2'-fluoroadenosine-3'-phosphate
  modified_base 11: mod_base = OTHER; note = 2'-deoxy-2'-fluorouridine-3'-phosphate
  modified_base 12: mod_base = OTHER; note = 2'-O-methyladenosine-3'-phosphate
  modified_base 13: mod_base = OTHER; note = 2'-O-methyluridine-3'-phosphate
  modified_base 14: mod_base = OTHER; note = 2'-O-methylguanosine-3'-phosphate
  modified_base 15: mod_base = OTHER; note = 2'-O-methyladenosine-3'-phosphate
  modified_base 16: mod_base = OTHER; note = 2'-O-methylcytidine-3'-phosphate
  modified_base 17: mod_base = OTHER; note = 2'-O-methyladenosine-3'-phosphate
  modified_base 18: mod_base = OTHER; note = 2'-O-methyluridine-3'-phosphate
  modified_base 19: mod_base = OTHER; note = 2'-O-methyluridine-3'-phosphate
  modified_base 20: mod_base = OTHER; note = 2'-O-methyluridine-3'-phosphate
  modified_base 21: mod_base = OTHER; note = 2'-O-methyluridine-3'-phosphate ((2S,4R)-1-[29-[[2-(acetylamino)-2-deoxy-beta-D-galactopyra nosyl]oxy]-14,14-bis[[3-[[3-[[5-[[2-(acetylamino)-2-deoxy-b eta-D-galactopyranosyl]oxy]-1-oxopentyl]amino]propyl]amino] -3-oxopropoxy]methyl]-1,12,19,25-tetraoxo-16-oxa-13,20,24-t riazanonacos-1-yl]-4-hydroxy-2-pyrrolidinyl)methyl ester
cacagcttcatatgacatttt

SEQ ID NO: 807 - RNA, 21 nt, synthetic construct
  source 1..21: mol_type = other RNA
  modified_base 1: mod_base = OTHER; note = 2'-O-methyluridine-3'-phosphorothioate
  modified_base 2: mod_base = OTHER; note = 2'-O-methyluridine-3'-phosphorothioate
  modified_base 3: mod_base = OTHER; note = 2'-O-methylcytidine-3'-phosphate
  modified_base 4: mod_base = OTHER; note = 2'-O-methyladenosine-3'-phosphate
  modified_base 5: mod_base = OTHER; note = 2'-O-methyluridine-3'-phosphate
  modified_base 6: mod_base = OTHER; note = 2'-O-methyladenosine-3'-phosphate
  modified_base 7: mod_base = OTHER; note = 2'-deoxy-2'-fluorouridine-3'-phosphate
  modified_base 8: mod_base = OTHER; note = 2'-O-methylguanosine-3'-phosphate
  modified_base 9: mod_base = OTHER; note = 2'-deoxy-2'-fluoroadenosine-3'-phosphate
  modified_base 10: mod_base = OTHER; note = 2'-deoxy-2'-fluorocytidine-3'-phosphate
  modified_base 11: mod_base = OTHER; note = 2'-deoxy-2'-fluoroadenosine-3'-phosphate
  modified_base 12: mod_base = OTHER; note = 2'-O-methyluridine-3'-phosphate
  modified_base 13: mod_base = OTHER; note = 2'-O-methyluridine-3'-phosphate
  modified_base 14: mod_base = OTHER; note = 2'-O-methyluridine-3'-phosphate
  modified_base 15: mod_base = OTHER; note = 2'-O-methyladenosine-3'-phosphate
  modified_base 16: mod_base = OTHER; note = 2'-O-methyluridine-3'-phosphate
  modified_base 17: mod_base = OTHER; note = 2'-O-methylguanosine-3'-phosphate
  modified_base 18: mod_base = OTHER; note = 2'-O-methyladenosine-3'-phosphate
  modified_base 19: mod_base = OTHER; note = 2'-O-methyluridine-3'-phosphate
  modified_base 20: mod_base = OTHER; note = 2'-O-methyluridine-3'-phosphate
  modified_base 21: mod_base = OTHER; note = 2'-O-methyluridine-3'-phosphate ((2S,4R)-1-[29-[[2-(acetylamino)-2-deoxy-beta-D-galactopyra nosyl]oxy]-14,14-bis[[3-[[3-[[5-[[2-(acetylamino)-2-deoxy-b eta-D-galactopyranosyl]oxy]-1-oxopentyl]amino]propyl]amino] -3-oxopropoxy]methyl]-1,12,19,25-tetraoxo-16-oxa-13,20,24-t riazanonacos-1-yl]-4-hydroxy-2-pyrrolidinyl)methyl ester
ttcatatgacatttatgattt

SEQ ID NO: 808 - RNA, 21 nt, synthetic construct
  source 1..21: mol_type = other RNA
  modified_base 1: mod_base = OTHER; note = 2'-O-methyluridine-3'-phosphorothioate
  modified_base 2: mod_base = OTHER; note = 2'-O-methylguanosine-3'-phosphorothioate
  modified_base 3: mod_base = OTHER; note = 2'-O-methyladenosine-3'-phosphate
  modified_base 4: mod_base = OTHER; note = 2'-O-methyluridine-3'-phosphate
  modified_base 5: mod_base = OTHER; note = 2'-O-methyluridine-3'-phosphate
  modified_base 6: mod_base = OTHER; note = 2'-O-methyluridine-3'-phosphate
  modified_base 7: mod_base = OTHER; note = 2'-deoxy-2'-fluoroadenosine-3'-phosphate
  modified_base 8: mod_base = OTHER; note = 2'-O-methyladenosine-3'-phosphate
  modified_base 9: mod_base = OTHER; note = 2'-deoxy-2'-fluoroadenosine-3'-phosphate
  modified_base 10: mod_base = OTHER; note = 2'-deoxy-2'-fluorouridine-3'-phosphate
  modified_base 11: mod_base = OTHER; note = 2'-deoxy-2'-fluoroadenosine-3'-phosphate
  modified_base 12: mod_base = OTHER; note = 2'-O-methyladenosine-3'-phosphate
  modified_base 13: mod_base = OTHER; note = 2'-O-methyladenosine-3'-phosphate
  modified_base 14: mod_base = OTHER; note = 2'-O-methyladenosine-3'-phosphate
  modified_base 15: mod_base = OTHER; note = 2'-O-methylguanosine-3'-phosphate
  modified_base 16: mod_base = OTHER; note = 2'-O-methylguanosine-3'-phosphate
  modified_base 17: mod_base = OTHER; note = 2'-O-methylcytidine-3'-phosphate
  modified_base 18: mod_base = OTHER; note = 2'-O-methyladenosine-3'-phosphate
  modified_base 19: mod_base = OTHER; note = 2'-O-methylguanosine-3'-phosphate
  modified_base 20: mod_base = OTHER; note = 2'-O-methylcytidine-3'-phosphate
  modified_base 21: mod_base = OTHER; note = 2'-O-methyluridine-3'-phosphate ((2S,4R)-1-[29-[[2-(acetylamino)-2-deoxy-beta-D-galactopyra nosyl]oxy]-14,14-bis[[3-[[3-[[5-[[2-(acetylamino)-2-deoxy-b eta-D-galactopyranosyl]oxy]-1-oxopentyl]amino]propyl]amino] -3-oxopropoxy]methyl]-1,12,19,25-tetraoxo-16-oxa-13,20,24-t riazanonacos-1-yl]-4-hydroxy-2-pyrrolidinyl)methyl ester
tgatttaaataaaaggcagct

SEQ ID NO: 809 - RNA, 21 nt, synthetic construct
  source 1..21: mol_type = other RNA
  modified_base 1: mod_base = OTHER; note = 2'-O-methyladenosine-3'-phosphorothioate
  modified_base 2: mod_base = OTHER; note = 2'-O-methyladenosine-3'-phosphorothioate
  modified_base 3: mod_base = OTHER; note = 2'-O-methyladenosine-3'-phosphate
  modified_base 4: mod_base = OTHER; note = 2'-O-methyluridine-3'-phosphate
  modified_base 5: mod_base = OTHER; note = 2'-O-methyladenosine-3'-phosphate
  modified_base 6: mod_base = OTHER; note = 2'-O-methyladenosine-3'-phosphate
  modified_base 7: mod_base = OTHER; note = 2'-deoxy-2'-fluoroadenosine-3'-phosphate
  modified_base 8: mod_base = OTHER; note = 2'-O-methyladenosine-3'-phosphate
  modified_base 9: mod_base = OTHER; note = 2'-deoxy-2'-fluoroguanosine-3'-phosphate
  modified_base 10: mod_base = OTHER; note = 2'-deoxy-2'-fluoroguanosine-3'-phosphate
  modified_base 11: mod_base = OTHER; note = 2'-deoxy-2'-fluorocytidine-3'-phosphate
  modified_base 12: mod_base = OTHER; note = 2'-O-methyladenosine-3'-phosphate
  modified_base 13: mod_base = OTHER; note = 2'-O-methylguanosine-3'-phosphate
  modified_base 14: mod_base = OTHER; note = 2'-O-methylcytidine-3'-phosphate
  modified_base 15: mod_base = OTHER; note = 2'-O-methyluridine-3'-phosphate
  modified_base 16: mod_base = OTHER; note = 2'-O-methylguanosine-3'-phosphate
  modified_base 17: mod_base = OTHER; note = 2'-O-methyladenosine-3'-phosphate
  modified_base 18: mod_base = OTHER; note = 2'-O-methyluridine-3'-phosphate
  modified_base 19: mod_base = OTHER; note = 2'-O-methyluridine-3'-phosphate
  modified_base 20: mod_base = OTHER; note = 2'-O-methyladenosine-3'-phosphate
  modified_base 21: mod_base = OTHER; note = 2'-O-methyluridine-3'-phosphate ((2S,4R)-1-[29-[[2-(acetylamino)-2-deoxy-beta-D-galactopyra nosyl]oxy]-14,14-bis[[3-[[3-[[5-[[2-(acetylamino)-2-deoxy-b eta-D-galactopyranosyl]oxy]-1-oxopentyl]amino]propyl]amino] -3-oxopropoxy]methyl]-1,12,19,25-tetraoxo-16-oxa-13,20,24-t riazanonacos-1-yl]-4-hydroxy-2-pyrrolidinyl)methyl ester
aaataaaaggcagctgattat

SEQ ID NO: 810 - RNA, 21 nt, synthetic construct
  source 1..21: mol_type = other RNA
  modified_base 1: mod_base = OTHER; note = 2'-O-methyladenosine-3'-phosphorothioate
  modified_base 2: mod_base = OTHER; note = 2'-O-methylguanosine-3'-phosphorothioate
  modified_base 3: mod_base = OTHER; note = 2'-O-methylguanosine-3'-phosphate
  modified_base 4: mod_base = OTHER; note = 2'-O-methylcytidine-3'-phosphate
  modified_base 5: mod_base = OTHER; note = 2'-O-methyladenosine-3'-phosphate
  modified_base 6: mod_base = OTHER; note = 2'-O-methylguanosine-3'-phosphate
  modified_base 7: mod_base = OTHER; note = 2'-deoxy-2'-fluorocytidine-3'-phosphate
  modified_base 8: mod_base = OTHER; note = 2'-O-methyluridine-3'-phosphate
  modified_base 9: mod_base = OTHER; note = 2'-deoxy-2'-fluoroguanosine-3'-phosphate
  modified_base 10: mod_base = OTHER; note = 2'-deoxy-2'-fluoroadenosine-3'-phosphate
  modified_base 11: mod_base = OTHER; note = 2'-deoxy-2'-fluorouridine-3'-phosphate
  modified_base 12: mod_base = OTHER; note = 2'-O-methyluridine-3'-phosphate
  modified_base 13: mod_base = OTHER; note = 2'-O-methyladenosine-3'-phosphate
  modified_base 14: mod_base = OTHER; note = 2'-O-methylcytidine-3'-phosphate
  modified_base 15: mod_base = OTHER; note = 2'-O-methyladenosine-3'-phosphate
  modified_base 16: mod_base = OTHER; note = 2'-O-methylguanosine-3'-phosphate
  modified_base 17: mod_base = OTHER; note = 2'-O-methyladenosine-3'-phosphate
  modified_base 18: mod_base = OTHER; note = 2'-O-methyladenosine-3'-phosphate
  modified_base 19: mod_base = OTHER; note = 2'-O-methylguanosine-3'-phosphate
  modified_base 20: mod_base = OTHER; note = 2'-O-methyladenosine-3'-phosphate
  modified_base 21: mod_base = OTHER; note = 2'-O-methyluridine-3'-phosphate ((2S,4R)-1-[29-[[2-(acetylamino)-2-deoxy-beta-D-galactopyra nosyl]oxy]-14,14-bis[[3-[[3-[[5-[[2-(acetylamino)-2-deoxy-b eta-D-galactopyranosyl]oxy]-1-oxopentyl]amino]propyl]amino] -3-oxopropoxy]methyl]-1,12,19,25-tetraoxo-16-oxa-13,20,24-t riazanonacos-1-yl]-4-hydroxy-2-pyrrolidinyl)methyl ester
aggcagctgattacagaagat

SEQ ID NO: 811 - RNA, 21 nt, synthetic construct
  source 1..21: mol_type = other RNA
  modified_base 1: mod_base = OTHER; note = 2'-O-methyluridine-3'-phosphorothioate
  modified_base 2: mod_base = OTHER; note = 2'-O-methylguanosine-3'-phosphorothioate
  modified_base 3: mod_base = OTHER; note = 2'-O-methyladenosine-3'-phosphate
  modified_base 4: mod_base = OTHER; note = 2'-O-methyluridine-3'-phosphate
  modified_base 5: mod_base = OTHER; note = 2'-O-methyluridine-3'-phosphate
  modified_base 6: mod_base = OTHER; note = 2'-O-methyladenosine-3'-phosphate
  modified_base 7: mod_base = OTHER; note = 2'-deoxy-2'-fluorocytidine-3'-phosphate
  modified_base 8: mod_base = OTHER; note = 2'-O-methyladenosine-3'-phosphate
  modified_base 9: mod_base = OTHER; note = 2'-deoxy-2'-fluoroguanosine-3'-phosphate
  modified_base 10: mod_base = OTHER; note = 2'-deoxy-2'-fluoroadenosine-3'-phosphate
  modified_base 11: mod_base = OTHER; note = 2'-deoxy-2'-fluoroadenosine-3'-phosphate
  modified_base 12: mod_base = OTHER; note = 2'-O-methylguanosine-3'-phosphate
  modified_base 13: mod_base = OTHER; note = 2'-O-methyladenosine-3'-phosphate
  modified_base 14: mod_base = OTHER; note = 2'-O-methylguanosine-3'-phosphate
  modified_base 15: mod_base = OTHER; note = 2'-O-methyladenosine-3'-phosphate
  modified_base 16: mod_base = OTHER; note = 2'-O-methylguanosine-3'-phosphate
  modified_base 17: mod_base = OTHER; note = 2'-O-methylguanosine-3'-phosphate
  modified_base 18: mod_base = OTHER; note = 2'-O-methyladenosine-3'-phosphate
  modified_base 19: mod_base = OTHER; note = 2'-O-methyluridine-3'-phosphate
  modified_base 20: mod_base = OTHER; note = 2'-O-methyluridine-3'-phosphate
  modified_base 21: mod_base = OTHER; note = 2'-O-methyluridine-3'-phosphate ((2S,4R)-1-[29-[[2-(acetylamino)-2-deoxy-beta-D-galactopyra nosyl]oxy]-14,14-bis[[3-[[3-[[5-[[2-(acetylamino)-2-deoxy-b eta-D-galactopyranosyl]oxy]-1-oxopentyl]amino]propyl]amino] -3-oxopropoxy]methyl]-1,12,19,25-tetraoxo-16-oxa-13,20,24-t riazanonacos-1-yl]-4-hydroxy-2-pyrrolidinyl)methyl ester
tgattacagaagagaggattt

SEQ ID NO: 812 - RNA, 21 nt, synthetic construct
  source 1..21: mol_type = other RNA
  modified_base 1: mod_base = OTHER; note = 2'-O-methyladenosine-3'-phosphorothioate
  modified_base 2: mod_base = OTHER; note = 2'-O-methyladenosine-3'-phosphorothioate
  modified_base 3: mod_base = OTHER; note = 2'-O-methylguanosine-3'-phosphate
  modified_base 4: mod_base = OTHER; note = 2'-O-methyladenosine-3'-phosphate
  modified_base 5: mod_base = OTHER; note = 2'-O-methylguanosine-3'-phosphate
  modified_base 6: mod_base = OTHER; note = 2'-O-methyladenosine-3'-phosphate
  modified_base 7: mod_base = OTHER; note = 2'-deoxy-2'-fluoroguanosine-3'-phosphate
  modified_base 8: mod_base = OTHER; note = 2'-O-methylguanosine-3'-phosphate
  modified_base 9: mod_base = OTHER; note = 2'-deoxy-2'-fluoroadenosine-3'-phosphate
  modified_base 10: mod_base = OTHER; note = 2'-deoxy-2'-fluorouridine-3'-phosphate
  modified_base 11: mod_base = OTHER; note = 2'-deoxy-2'-fluorouridine-3'-phosphate
  modified_base 12: mod_base = OTHER; note = 2'-O-methylcytidine-3'-phosphate
  modified_base 13: mod_base = OTHER; note = 2'-O-methylcytidine-3'-phosphate
  modified_base 14: mod_base = OTHER; note = 2'-O-methyladenosine-3'-phosphate
  modified_base 15: mod_base = OTHER; note = 2'-O-methyladenosine-3'-phosphate
  modified_base 16: mod_base = OTHER; note = 2'-O-methyladenosine-3'-phosphate
  modified_base 17: mod_base = OTHER; note = 2'-O-methylcytidine-3'-phosphate
  modified_base 18: mod_base = OTHER; note = 2'-O-methyladenosine-3'-phosphate
  modified_base 19: mod_base = OTHER; note = 2'-O-methyladenosine-3'-phosphate
  modified_base 20: mod_base = OTHER; note = 2'-O-methylcytidine-3'-phosphate
  modified_base 21: mod_base = OTHER; note = 2'-O-methyluridine-3'-phosphate ((2S,4R)-1-[29-[[2-(acetylamino)-2-deoxy-beta-D-galactopyra nosyl]oxy]-14,14-bis[[3-[[3-[[5-[[2-(acetylamino)-2-deoxy-b eta-D-galactopyranosyl]oxy]-1-oxopentyl]amino]propyl]amino] -3-oxopropoxy]methyl]-1,12,19,25-tetraoxo-16-oxa-13,20,24-t riazanonacos-1-yl]-4-hydroxy-2-pyrrolidinyl)methyl ester
aagagaggattccaaacaact

SEQ ID NO: 813 - RNA, 21 nt, synthetic construct
  source 1..21: mol_type = other RNA
  modified_base 1: mod_base = OTHER; note = 2'-O-methylguanosine-3'-phosphorothioate
  modified_base 2: mod_base = OTHER; note = 2'-O-methyladenosine-3'-phosphorothioate
  modified_base 3: mod_base = OTHER; note = 2'-O-methyluridine-3'-phosphate
  modified_base 4: mod_base = OTHER; note = 2'-O-methyluridine-3'-phosphate
  modified_base 5: mod_base = OTHER; note = 2'-O-methylcytidine-3'-phosphate
  modified_base 6: mod_base = OTHER; note = 2'-O-methylcytidine-3'-phosphate
  modified_base 7: mod_base = OTHER; note = 2'-deoxy-2'-fluoroadenosine-3'-phosphate
  modified_base 8: mod_base = OTHER; note = 2'-O-methyladenosine-3'-phosphate
  modified_base 9: mod_base = OTHER; note = 2'-deoxy-2'-fluoroadenosine-3'-phosphate
  modified_base 10: mod_base = OTHER; note = 2'-deoxy-2'-fluorocytidine-3'-phosphate
  modified_base 11: mod_base = OTHER; note = 2'-deoxy-2'-fluoroadenosine-3'-phosphate
  modified_base 12: mod_base = OTHER; note = 2'-O-methyladenosine-3'-phosphate
  modified_base 13: mod_base = OTHER; note = 2'-O-methylcytidine-3'-phosphate
  modified_base 14: mod_base = OTHER; note = 2'-O-methyladenosine-3'-phosphate
  modified_base 15: mod_base = OTHER; note = 2'-O-methylcytidine-3'-phosphate
  modified_base 16: mod_base = OTHER; note = 2'-O-methyladenosine-3'-phosphate
  modified_base 17: mod_base = OTHER; note = 2'-O-methylcytidine-3'-phosphate
  modified_base 18: mod_base = OTHER; note = 2'-O-methyladenosine-3'-phosphate
  modified_base 19: mod_base = OTHER; note = 2'-O-methylguanosine-3'-phosphate
  modified_base 20: mod_base = OTHER; note = 2'-O-methyluridine-3'-phosphate
  modified_base 21: mod_base = OTHER; note = 2'-O-methyluridine-3'-phosphate ((2S,4R)-1-[29-[[2-(acetylamino)-2-deoxy-beta-D-galactopyra nosyl]oxy]-14,14-bis[[3-[[3-[[5-[[2-(acetylamino)-2-deoxy-b eta-D-galactopyranosyl]oxy]-1-oxopentyl]amino]propyl]amino] -3-oxopropoxy]methyl]-1,12,19,25-tetraoxo-16-oxa-13,20,24-t riazanonacos-1-yl]-4-hydroxy-2-pyrrolidinyl)methyl ester
gattccaaacaacacacagtt

SEQ ID NO: 814 - RNA, 21 nt, synthetic construct
  source 1..21: mol_type = other RNA
  modified_base 1: mod_base = OTHER; note = 2'-O-methylcytidine-3'-phosphorothioate
  modified_base 2: mod_base = OTHER; note = 2'-O-methyladenosine-3'-phosphorothioate
  modified_base 3: mod_base = OTHER; note = 2'-O-methyladenosine-3'-phosphate
  modified_base 4: mod_base = OTHER; note = 2'-O-methylcytidine-3'-phosphate
  modified_base 5: mod_base = OTHER; note = 2'-O-methyladenosine-3'-phosphate
  modified_base 6: mod_base = OTHER; note = 2'-O-methylcytidine-3'-phosphate
  modified_base 7: mod_base = OTHER; note = 2'-deoxy-2'-fluoroadenosine-3'-phosphate
  modified_base 8: mod_base = OTHER; note = 2'-O-methylcytidine-3'-phosphate
  modified_base 9: mod_base = OTHER; note = 2'-deoxy-2'-fluoroadenosine-3'-phosphate
  modified_base 10: mod_base = OTHER; note = 2'-deoxy-2'-fluoroguanosine-3'-phosphate
  modified_base 11: mod_base = OTHER; note = 2'-deoxy-2'-fluorouridine-3'-phosphate
  modified_base 12: mod_base = OTHER; note = 2'-O-methylguanosine-3'-phosphate
  modified_base 13: mod_base = OTHER; note = 2'-O-methylguanosine-3'-phosphate
  modified_base 14: mod_base = OTHER; note = 2'-O-methylguanosine-3'-phosphate
  modified_base 15: mod_base = OTHER; note = 2'-O-methyluridine-3'-phosphate
  modified_base 16: mod_base = OTHER; note = 2'-O-methylcytidine-3'-phosphate
  modified_base 17: mod_base = OTHER; note = 2'-O-methyladenosine-3'-phosphate
  modified_base 18: mod_base = OTHER; note = 2'-O-methylcytidine-3'-phosphate
  modified_base 19: mod_base = OTHER; note = 2'-O-methyladenosine-3'-phosphate
  modified_base 20: mod_base = OTHER; note = 2'-O-methyluridine-3'-phosphate
  modified_base 21: mod_base = OTHER; note = 2'-O-methyluridine-3'-phosphate ((2S,4R)-1-[29-[[2-(acetylamino)-2-deoxy-beta-D-galactopyra nosyl]oxy]-14,14-bis[[3-[[3-[[5-[[2-(acetylamino)-2-deoxy-b eta-D-galactopyranosyl]oxy]-1-oxopentyl]amino]propyl]amino] -3-oxopropoxy]methyl]-1,12,19,25-tetraoxo-16-oxa-13,20,24-t riazanonacos-1-yl]-4-hydroxy-2-pyrrolidinyl)methyl ester
caacacacagtgggtcacatt

SEQ ID NO: 815 - RNA, 21 nt, synthetic construct
  source 1..21: mol_type = other RNA
  modified_base 1: mod_base = OTHER; note = 2'-O-methyluridine-3'-phosphorothioate
  modified_base 2: mod_base = OTHER; note = 2'-O-methylguanosine-3'-phosphorothioate
  modified_base 3: mod_base = OTHER; note = 2'-O-methylguanosine-3'-phosphate
  modified_base 4: mod_base = OTHER; note = 2'-O-methylguanosine-3'-phosphate
  modified_base 5: mod_base = OTHER; note = 2'-O-methyluridine-3'-phosphate
  modified_base 6: mod_base = OTHER; note = 2'-O-methylcytidine-3'-phosphate
  modified_base 7: mod_base = OTHER; note = 2'-deoxy-2'-fluoroadenosine-3'-phosphate
  modified_base 8: mod_base = OTHER; note = 2'-O-methylcytidine-3'-phosphate
  modified_base 9: mod_base = OTHER; note = 2'-deoxy-2'-fluoroadenosine-3'-phosphate
  modified_base 10: mod_base = OTHER; note = 2'-deoxy-2'-fluorouridine-3'-phosphate
  modified_base 11: mod_base = OTHER; note = 2'-deoxy-2'-fluoroguanosine-3'-phosphate
  modified_base 12: mod_base = OTHER; note = 2'-O-methylguanosine-3'-phosphate
  modified_base 13: mod_base = OTHER; note = 2'-O-methyluridine-3'-phosphate
  modified_base 14: mod_base = OTHER; note = 2'-O-methylcytidine-3'-phosphate
  modified_base 15: mod_base = OTHER; note = 2'-O-methyladenosine-3'-phosphate
  modified_base 16: mod_base = OTHER; note = 2'-O-methylcytidine-3'-phosphate
  modified_base 17: mod_base = OTHER; note = 2'-O-methylcytidine-3'-phosphate
  modified_base 18: mod_base = OTHER; note = 2'-O-methyladenosine-3'-phosphate
  modified_base 19: mod_base = OTHER; note = 2'-O-methylguanosine-3'-phosphate
  modified_base 20: mod_base = OTHER; note = 2'-O-methyluridine-3'-phosphate
  modified_base 21: mod_base = OTHER; note = 2'-O-methyluridine-3'-phosphate ((2S,4R)-1-[29-[[2-(acetylamino)-2-deoxy-beta-D-galactopyra nosyl]oxy]-14,14-bis[[3-[[3-[[5-[[2-(acetylamino)-2-deoxy-b eta-D-galactopyranosyl]oxy]-1-oxopentyl]amino]propyl]amino] -3-oxopropoxy]methyl]-1,12,19,25-tetraoxo-16-oxa-13,20,24-t riazanonacos-1-yl]-4-hydroxy-2-pyrrolidinyl)methyl ester
tgggtcacatggtcaccagtt

SEQ ID NO: 816 - RNA, 21 nt, synthetic construct
  source 1..21: mol_type = other RNA
  modified_base 1: mod_base = OTHER; note = 2'-O-methyladenosine-3'-phosphorothioate
  modified_base 2: mod_base = OTHER; note = 2'-O-methyluridine-3'-phosphorothioate
  modified_base 3: mod_base = OTHER; note = 2'-O-methylguanosine-3'-phosphate
  modified_base 4: mod_base = OTHER; note = 2'-O-methylguanosine-3'-phosphate
  modified_base 5: mod_base = OTHER; note = 2'-O-methyluridine-3'-phosphate
  modified_base 6: mod_base = OTHER; note = 2'-O-methylcytidine-3'-phosphate
  modified_base 7: mod_base = OTHER; note = 2'-deoxy-2'-fluoroadenosine-3'-phosphate
  modified_base 8: mod_base = OTHER; note = 2'-O-methylcytidine-3'-phosphate
  modified_base 9: mod_base = OTHER; note = 2'-deoxy-2'-fluorocytidine-3'-phosphate
  modified_base 10: mod_base = OTHER; note = 2'-deoxy-2'-fluoroadenosine-3'-phosphate
  modified_base 11: mod_base = OTHER; note = 2'-deoxy-2'-fluoroguanosine-3'-phosphate
  modified_base 12: mod_base = OTHER; note = 2'-O-methyluridine-3'-phosphate
  modified_base 13: mod_base = OTHER; note = 2'-O-methylguanosine-3'-phosphate
  modified_base 14: mod_base = OTHER; note = 2'-O-methylguanosine-3'-phosphate
  modified_base 15: mod_base = OTHER; note = 2'-O-methylguanosine-3'-phosphate
  modified_base 16: mod_base = OTHER; note = 2'-O-methyluridine-3'-phosphate
  modified_base 17: mod_base = OTHER; note = 2'-O-methylcytidine-3'-phosphate
  modified_base 18: mod_base = OTHER; note = 2'-O-methyladenosine-3'-phosphate
  modified_base 19: mod_base = OTHER; note = 2'-O-methyluridine-3'-phosphate
  modified_base 20: mod_base = OTHER; note = 2'-O-methyladenosine-3'-phosphate
  modified_base 21: mod_base = OTHER; note = 2'-O-methyluridine-3'-phosphate ((2S,4R)-1-[29-[[2-(acetylamino)-2-deoxy-beta-D-galactopyra nosyl]oxy]-14,14-bis[[3-[[3-[[5-[[2-(acetylamino)-2-deoxy-b eta-D-galactopyranosyl]oxy]-1-oxopentyl]amino]propyl]amino] -3-oxopropoxy]methyl]-1,12,19,25-tetraoxo-16-oxa-13,20,24-t riazanonacos-1-yl]-4-hydroxy-2-pyrrolidinyl)methyl ester
atggtcaccagtgggtcatat

SEQ ID NO: 817 - RNA, 21 nt, synthetic construct
  source 1..21: mol_type = other RNA
  modified_base 1: mod_base = OTHER; note = 2'-O-methyladenosine-3'-phosphorothioate
  modified_base 2: mod_base = OTHER; note = 2'-O-methylguanosine-3'-phosphorothioate
  modified_base 3: mod_base = OTHER; note = 2'-O-methyluridine-3'-phosphate
  modified_base 4: mod_base = OTHER; note = 2'-O-methylguanosine-3'-phosphate
  modified_base 5: mod_base = OTHER; note = 2'-O-methylguanosine-3'-phosphate
  modified_base 6: mod_base = OTHER; note = 2'-O-methylguanosine-3'-phosphate
  modified_base 7: mod_base = OTHER; note = 2'-deoxy-2'-fluorouridine-3'-phosphate
  modified_base 8: mod_base = OTHER; note = 2'-O-methylcytidine-3'-phosphate
  modified_base 9: mod_base = OTHER; note = 2'-deoxy-2'-fluoroadenosine-3'-phosphate
  modified_base 10: mod_base = OTHER; note = 2'-deoxy-2'-fluorouridine-3'-phosphate
  modified_base 11: mod_base = OTHER; note = 2'-deoxy-2'-fluoroadenosine-3'-phosphate
  modified_base 12: mod_base = OTHER; note = 2'-O-methyladenosine-3'-phosphate
  modified_base 13: mod_base = OTHER; note = 2'-O-methyladenosine-3'-phosphate
  modified_base 14: mod_base = OTHER; note = 2'-O-methyluridine-3'-phosphate
  modified_base 15: mod_base = OTHER; note = 2'-O-methyluridine-3'-phosphate
  modified_base 16: mod_base = OTHER; note = 2'-O-methylguanosine-3'-phosphate
  modified_base 17: mod_base = OTHER; note = 2'-O-methylguanosine-3'-phosphate
  modified_base 18: mod_base = OTHER; note = 2'-O-methylcytidine-3'-phosphate
  modified_base 19: mod_base = OTHER; note = 2'-O-methyladenosine-3'-phosphate
  modified_base 20: mod_base = OTHER; note = 2'-O-methyluridine-3'-phosphate
  modified_base 21: mod_base = OTHER; note = 2'-O-methyluridine-3'-phosphate ((2S,4R)-1-[29-[[2-(acetylamino)-2-deoxy-beta-D-galactopyra nosyl]oxy]-14,14-bis[[3-[[3-[[5-[[2-(acetylamino)-2-deoxy-b eta-D-galactopyranosyl]oxy]-1-oxopentyl]amino]propyl]amino] -3-oxopropoxy]methyl]-1,12,19,25-tetraoxo-16-oxa-13,20,24-t riazanonacos-1-yl]-4-hydroxy-2-pyrrolidinyl)methyl ester
agtgggtcataaattggcatt

SEQ ID NO: 818 - RNA, 21 nt, synthetic construct
  source 1..21: mol_type = other RNA
  modified_base 1: mod_base = OTHER; note = 2'-O-methylcytidine-3'-phosphorothioate
  modified_base 2: mod_base = OTHER; note = 2'-O-methyladenosine-3'-phosphorothioate
  modified_base 3: mod_base = OTHER; note = 2'-O-methyluridine-3'-phosphate
  modified_base 4: mod_base = OTHER; note = 2'-O-methyladenosine-3'-phosphate
  modified_base 5: mod_base = OTHER; note = 2'-O-methyladenosine-3'-phosphate
  modified_base 6: mod_base = OTHER; note = 2'-O-methyladenosine-3'-phosphate
  modified_base 7: mod_base = OTHER; note = 2'-deoxy-2'-fluorouridine-3'-phosphate
  modified_base 8: mod_base = OTHER; note = 2'-O-methyluridine-3'-phosphate
  modified_base 9: mod_base = OTHER; note = 2'-deoxy-2'-fluoroguanosine-3'-phosphate
  modified_base 10: mod_base = OTHER; note = 2'-deoxy-2'-fluoroguanosine-3'-phosphate
  modified_base 11: mod_base = OTHER; note = 2'-deoxy-2'-fluorocytidine-3'-phosphate
  modified_base 12: mod_base = OTHER; note = 2'-O-methyladenosine-3'-phosphate
  modified_base 13: mod_base = OTHER; note = 2'-O-methyluridine-3'-phosphate
  modified_base 14: mod_base = OTHER; note = 2'-O-methyladenosine-3'-phosphate
  modified_base 15: mod_base = OTHER; note = 2'-O-methyluridine-3'-phosphate
  modified_base 16: mod_base = OTHER; note = 2'-O-methylguanosine-3'-phosphate
  modified_base 17: mod_base = OTHER; note = 2'-O-methyluridine-3'-phosphate
  modified_base 18: mod_base = OTHER; note = 2'-O-methyluridine-3'-phosphate
  modified_base 19: mod_base = OTHER; note = 2'-O-methyluridine-3'-phosphate
  modified_base 20: mod_base = OTHER; note = 2'-O-methylguanosine-3'-phosphate
  modified_base 21: mod_base = OTHER; note = 2'-O-methyluridine-3'-phosphate ((2S,4R)-1-[29-[[2-(acetylamino)-2-deoxy-beta-D-galactopyra nosyl]oxy]-14,14-bis[[3-[[3-[[5-[[2-(acetylamino)-2-deoxy-b eta-D-galactopyranosyl]oxy]-1-oxopentyl]amino]propyl]amino] -3-oxopropoxy]methyl]-1,12,19,25-tetraoxo-16-oxa-13,20,24-t riazanonacos-1-yl]-4-hydroxy-2-pyrrolidinyl)methyl ester
cataaattggcatatgtttgt

SEQ ID NO: 819 - RNA, 21 nt, synthetic construct
  source 1..21: mol_type = other RNA
  modified_base 1: mod_base = OTHER; note = 2'-O-methylguanosine-3'-phosphorothioate
  modified_base 2: mod_base = OTHER; note = 2'-O-methylguanosine-3'-phosphorothioate
  modified_base 3: mod_base = OTHER; note = 2'-O-methylcytidine-3'-phosphate
  modified_base 4: mod_base = OTHER; note = 2'-O-methyladenosine-3'-phosphate
  modified_base 5: mod_base = OTHER; note = 2'-O-methyluridine-3'-phosphate
  modified_base 6: mod_base = OTHER; note = 2'-O-methyladenosine-3'-phosphate
  modified_base 7: mod_base = OTHER; note = 2'-deoxy-2'-fluorouridine-3'-phosphate
  modified_base 8: mod_base = OTHER; note = 2'-O-methylguanosine-3'-phosphate
  modified_base 9: mod_base = OTHER; note = 2'-deoxy-2'-fluorouridine-3'-phosphate
  modified_base 10: mod_base = OTHER; note = 2'-deoxy-2'-fluorouridine-3'-phosphate
  modified_base 11: mod_base = OTHER; note = 2'-deoxy-2'-fluorouridine-3'-phosphate
  modified_base 12: mod_base = OTHER; note = 2'-O-methylguanosine-3'-phosphate
  modified_base 13: mod_base = OTHER; note = 2'-O-methylguanosine-3'-phosphate
  modified_base 14: mod_base = OTHER; note = 2'-O-methyladenosine-3'-phosphate
  modified_base 15: mod_base = OTHER; note = 2'-O-methyladenosine-3'-phosphate
  modified_base 16: mod_base = OTHER; note = 2'-O-methylcytidine-3'-phosphate
  modified_base 17: mod_base = OTHER; note = 2'-O-methyladenosine-3'-phosphate
  modified_base 18: mod_base = OTHER; note = 2'-O-methyladenosine-3'-phosphate
  modified_base 19: mod_base = OTHER; note = 2'-O-methyluridine-3'-phosphate
  modified_base 20: mod_base = OTHER; note = 2'-O-methylguanosine-3'-phosphate
  modified_base 21: mod_base = OTHER; note = 2'-O-methyluridine-3'-phosphate ((2S,4R)-1-[29-[[2-(acetylamino)-2-deoxy-beta-D-galactopyra nosyl]oxy]-14,14-bis[[3-[[3-[[5-[[2-(acetylamino)-2-deoxy-b eta-D-galactopyranosyl]oxy]-1-oxopentyl]amino]propyl]amino] -3-oxopropoxy]methyl]-1,12,19,25-tetraoxo-16-oxa-13,20,24-t riazanonacos-1-yl]-4-hydroxy-2-pyrrolidinyl)methyl ester
ggcatatgtttggaacaatgt

SEQ ID NO: 820 - RNA, 21 nt, synthetic construct
  source 1..21: mol_type = other RNA
  modified_base 1: mod_base = OTHER; note = 2'-O-methyluridine-3'-phosphorothioate
  modified_base 2: mod_base = OTHER; note = 2'-O-methylguanosine-3'-phosphorothioate
  modified_base 3: mod_base = OTHER; note = 2'-O-methylguanosine-3'-phosphate
  modified_base 4: mod_base = OTHER; note = 2'-O-methyladenosine-3'-phosphate
  modified_base 5: mod_base = OTHER; note = 2'-O-methyladenosine-3'-phosphate
  modified_base 6: mod_base = OTHER; note = 2'-O-methylcytidine-3'-phosphate
  modified_base 7: mod_base = OTHER; note = 2'-deoxy-2'-fluoroadenosine-3'-phosphate
  modified_base 8: mod_base = OTHER; note = 2'-O-methyladenosine-3'-phosphate
  modified_base 9: mod_base = OTHER; note = 2'-deoxy-2'-fluorouridine-3'-phosphate
  modified_base 10: mod_base = OTHER; note = 2'-deoxy-2'-fluoroguanosine-3'-phosphate
  modified_base 11: mod_base = OTHER; note = 2'-deoxy-2'-fluoroadenosine-3'-phosphate
  modified_base 12: mod_base = OTHER; note = 2'-O-methylcytidine-3'-phosphate
  modified_base 13: mod_base = OTHER; note = 2'-O-methyladenosine-3'-phosphate
  modified_base 14: mod_base = OTHER; note = 2'-O-methyluridine-3'-phosphate
  modified_base 15: mod_base = OTHER; note = 2'-O-methyluridine-3'-phosphate
  modified_base 16: mod_base = OTHER; note = 2'-O-methyluridine-3'-phosphate
  modified_base 17: mod_base = OTHER; note = 2'-O-methyladenosine-3'-phosphate
  modified_base 18: mod_base = OTHER; note = 2'-O-methyluridine-3'-phosphate
  modified_base 19: mod_base = OTHER; note = 2'-O-methylguanosine-3'-phosphate
  modified_base 20: mod_base = OTHER; note = 2'-O-methyluridine-3'-phosphate
  modified_base 21: mod_base = OTHER; note = 2'-O-methyluridine-3'-phosphate ((2S,4R)-1-[29-[[2-(acetylamino)-2-deoxy-beta-D-galactopyra nosyl]oxy]-14,14-bis[[3-[[3-[[5-[[2-(acetylamino)-2-deoxy-b eta-D-galactopyranosyl]oxy]-1-oxopentyl]amino]propyl]amino] -3-oxopropoxy]methyl]-1,12,19,25-tetraoxo-16-oxa-13,20,24-t riazanonacos-1-yl]-4-hydroxy-2-pyrrolidinyl)methyl ester
tggaacaatgacatttatgtt

SEQ ID NO: 821 - RNA, 21 nt, synthetic construct
  source 1..21: mol_type = other RNA
  modified_base 1: mod_base = OTHER; note = 2'-O-methyluridine-3'-phosphorothioate
  modified_base 2: mod_base = OTHER; note = 2'-O-methyluridine-3'-phosphorothioate
  modified_base 3: mod_base = OTHER; note = 2'-O-methylguanosine-3'-phosphate
  modified_base 4: mod_base = OTHER; note = 2'-O-methyladenosine-3'-phosphate
  modified_base 5: mod_base = OTHER; note = 2'-O-methyladenosine-3'-phosphate
  modified_base 6: mod_base = OTHER; note = 2'-O-methylcytidine-3'-phosphate
  modified_base 7: mod_base = OTHER; note = 2'-deoxy-2'-fluorocytidine-3'-phosphate
  modified_base 8: mod_base = OTHER; note = 2'-O-methyladenosine-3'-phosphate
  modified_base 9: mod_base = OTHER; note = 2'-deoxy-2'-fluoroadenosine-3'-phosphate
  modified_base 10: mod_base = OTHER; note = 2'-deoxy-2'-fluoroadenosine-3'-phosphate
  modified_base 11: mod_base = OTHER; note = 2'-deoxy-2'-fluorouridine-3'-phosphate
  modified_base 12: mod_base = OTHER; note = 2'-O-methyluridine-3'-phosphate
  modified_base 13: mod_base = OTHER; note = 2'-O-methyluridine-3'-phosphate
  modified_base 14: mod_base = OTHER; note = 2'-O-methyladenosine-3'-phosphate
  modified_base 15: mod_base = OTHER; note = 2'-O-methylcytidine-3'-phosphate
  modified_base 16: mod_base = OTHER; note = 2'-O-methylcytidine-3'-phosphate
  modified_base 17: mod_base = OTHER; note = 2'-O-methyladenosine-3'-phosphate
  modified_base 18: mod_base = OTHER; note = 2'-O-methyladenosine-3'-phosphate
  modified_base 19: mod_base = OTHER; note = 2'-O-methylguanosine-3'-phosphate
  modified_base 20: mod_base = OTHER; note = 2'-O-methyluridine-3'-phosphate
  modified_base 21: mod_base = OTHER; note = 2'-O-methyluridine-3'-phosphate ((2S,4R)-1-[29-[[2-(acetylamino)-2-deoxy-beta-D-galactopyra nosyl]oxy]-14,14-bis[[3-[[3-[[5-[[2-(acetylamino)-2-deoxy-b eta-D-galactopyranosyl]oxy]-1-oxopentyl]amino]propyl]amino] -3-oxopropoxy]methyl]-1,12,19,25-tetraoxo-16-oxa-13,20,24-t riazanonacos-1-yl]-4-hydroxy-2-pyrrolidinyl)methyl ester
ttgaaccaaatttaccaagtt

SEQ ID NO: 822 - RNA, 21 nt, synthetic construct
  source 1..21: mol_type = other RNA
  modified_base 1: mod_base = OTHER; note = 2'-O-methylcytidine-3'-phosphorothioate
  modified_base 2: mod_base = OTHER; note = 2'-O-methyladenosine-3'-phosphorothioate
  modified_base 3: mod_base = OTHER; note = 2'-O-methyladenosine-3'-phosphate
  modified_base 4: mod_base = OTHER; note = 2'-O-methyladenosine-3'-phosphate
  modified_base 5: mod_base = OTHER; note = 2'-O-methyluridine-3'-phosphate
  modified_base 6: mod_base = OTHER; note = 2'-O-methyluridine-3'-phosphate
  modified_base 7: mod_base = OTHER; note = 2'-deoxy-2'-fluorouridine-3'-phosphate
  modified_base 8: mod_base = OTHER; note = 2'-O-methyladenosine-3'-phosphate
  modified_base 9: mod_base = OTHER; note = 2'-deoxy-2'-fluorocytidine-3'-phosphate
  modified_base 10: mod_base = OTHER; note = 2'-deoxy-2'-fluorocytidine-3'-phosphate
  modified_base 11: mod_base = OTHER; note = 2'-deoxy-2'-fluoroadenosine-3'-phosphate
  modified_base 12: mod_base = OTHER; note = 2'-O-methyladenosine-3'-phosphate
  modified_base 13: mod_base = OTHER; note = 2'-O-methylguanosine-3'-phosphate
  modified_base 14: mod_base = OTHER; note = 2'-O-methyluridine-3'-phosphate
  modified_base 15: mod_base = OTHER; note = 2'-O-methyluridine-3'-phosphate
  modified_base 16: mod_base = OTHER; note = 2'-O-methyladenosine-3'-phosphate
  modified_base 17: mod_base = OTHER; note = 2'-O-methylcytidine-3'-phosphate
  modified_base 18: mod_base = OTHER; note = 2'-O-methyladenosine-3'-phosphate
  modified_base 19: mod_base = OTHER; note = 2'-O-methylguanosine-3'-phosphate
  modified_base 20: mod_base = OTHER; note = 2'-O-methyladenosine-3'-phosphate
  modified_base 21: mod_base = OTHER; note = 2'-O-methyluridine-3'-phosphate ((2S,4R)-1-[29-[[2-(acetylamino)-2-deoxy-beta-D-galactopyra nosyl]oxy]-14,14-bis[[3-[[3-[[5-[[2-(acetylamino)-2-deoxy-b eta-D-galactopyranosyl]oxy]-1-oxopentyl]amino]propyl]amino] -3-oxopropoxy]methyl]-1,12,19,25-tetraoxo-16-oxa-13,20,24-t riazanonacos-1-yl]-4-hydroxy-2-pyrrolidinyl)methyl ester
caaatttaccaagttacagat

SEQ ID NO: 823 - RNA, 21 nt, synthetic construct
  source 1..21: mol_type = other RNA
  modified_base 1: mod_base = OTHER; note = 2'-O-methyladenosine-3'-phosphorothioate
  modified_base 2: mod_base = OTHER; note = 2'-O-methylcytidine-3'-phosphorothioate
  modified_base 3: mod_base = OTHER; note = 2'-O-methylcytidine-3'-phosphate
  modified_base 4: mod_base = OTHER; note = 2'-O-methyladenosine-3'-phosphate
  modified_base 5: mod_base = OTHER; note = 2'-O-methyladenosine-3'-phosphate
  modified_base 6: mod_base = OTHER; note = 2'-O-methylguanosine-3'-phosphate
  modified_base 7: mod_base = OTHER; note = 2'-deoxy-2'-fluorouridine-3'-phosphate
  modified_base 8: mod_base = OTHER; note = 2'-O-methyluridine-3'-phosphate
  modified_base 9: mod_base = OTHER; note = 2'-deoxy-2'-fluoroadenosine-3'-phosphate
  modified_base 10: mod_base = OTHER; note = 2'-deoxy-2'-fluorocytidine-3'-phosphate
  modified_base 11: mod_base = OTHER; note = 2'-deoxy-2'-fluoroadenosine-3'-phosphate
  modified_base 12: mod_base = OTHER; note = 2'-O-methylguanosine-3'-phosphate
  modified_base 13: mod_base = OTHER; note = 2'-O-methyladenosine-3'-phosphate
  modified_base 14: mod_base = OTHER; note = 2'-O-methyladenosine-3'-phosphate
  modified_base 15: mod_base = OTHER; note = 2'-O-methyluridine-3'-phosphate
  modified_base 16: mod_base = OTHER; note = 2'-O-methylcytidine-3'-phosphate
  modified_base 17: mod_base = OTHER; note = 2'-O-methyladenosine-3'-phosphate
  modified_base 18: mod_base = OTHER; note = 2'-O-methylcytidine-3'-phosphate
  modified_base 19: mod_base = OTHER; note = 2'-O-methyladenosine-3'-phosphate
  modified_base 20: mod_base = OTHER; note = 2'-O-methyluridine-3'-phosphate
  modified_base 21: mod_base = OTHER; note = 2'-O-methyluridine-3'-phosphate ((2S,4R)-1-[29-[[2-(acetylamino)-2-deoxy-beta-D-galactopyra nosyl]oxy]-14,14-bis[[3-[[3-[[5-[[2-(acetylamino)-2-deoxy-b eta-D-galactopyranosyl]oxy]-1-oxopentyl]amino]propyl]amino] -3-oxopropoxy]methyl]-1,12,19,25-tetraoxo-16-oxa-13,20,24-t riazanonacos-1-yl]-4-hydroxy-2-pyrrolidinyl)methyl ester
accaagttacagaatcacatt

SEQ ID NO: 824 - RNA, 21 nt, synthetic construct
  source 1..21: mol_type = other RNA
  modified_base 1: mod_base = OTHER; note = 2'-O-methyluridine-3'-phosphorothioate
  modified_base 2: mod_base = OTHER; note = 2'-O-methyluridine-3'-phosphorothioate
  modified_base 3: mod_base = OTHER; note = 2'-O-methyladenosine-3'-phosphate
  modified_base 4: mod_base = OTHER; note = 2'-O-methylcytidine-3'-phosphate
  modified_base 5: mod_base = OTHER; note = 2'-O-methyladenosine-3'-phosphate
  modified_base 6: mod_base = OTHER; note = 2'-O-methylguanosine-3'-phosphate
  modified_base 7: mod_base = OTHER; note = 2'-deoxy-2'-fluoroadenosine-3'-phosphate
  modified_base 8: mod_base = OTHER; note = 2'-O-methyladenosine-3'-phosphate
  modified_base 9: mod_base = OTHER; note = 2'-deoxy-2'-fluorouridine-3'-phosphate
  modified_base 10: mod_base = OTHER; note = 2'-deoxy-2'-fluorocytidine-3'-phosphate
  modified_base 11: mod_base = OTHER; note = 2'-deoxy-2'-fluoroadenosine-3'-phosphate
  modified_base 12: mod_base = OTHER; note = 2'-O-methylcytidine-3'-phosphate
  modified_base 13: mod_base = OTHER; note = 2'-O-methyladenosine-3'-phosphate
  modified_base 14: mod_base = OTHER; note = 2'-O-methyluridine-3'-phosphate
  modified_base 15: mod_base = OTHER; note = 2'-O-methylguanosine-3'-phosphate
  modified_base 16: mod_base = OTHER; note = 2'-O-methylguanosine-3'-phosphate
  modified_base 17: mod_base = OTHER; note = 2'-O-methyladenosine-3'-phosphate
  modified_base 18: mod_base = OTHER; note = 2'-O-methylcytidine-3'-phosphate
  modified_base 19: mod_base = OTHER; note = 2'-O-methylguanosine-3'-phosphate
  modified_base 20: mod_base = OTHER; note = 2'-O-methylguanosine-3'-phosphate
  modified_base 21: mod_base = OTHER; note = 2'-O-methyluridine-3'-phosphate ((2S,4R)-1-[29-[[2-(acetylamino)-2-deoxy-beta-D-galactopyra nosyl]oxy]-14,14-bis[[3-[[3-[[5-[[2-(acetylamino)-2-deoxy-b eta-D-galactopyranosyl]oxy]-1-oxopentyl]amino]propyl]amino] -3-oxopropoxy]methyl]-1,12,19,25-tetraoxo-16-oxa-13,20,24-t riazanonacos-1-yl]-4-hydroxy-2-pyrrolidinyl)methyl ester
ttacagaatcacatggacggt

SEQ ID NO: 825 - RNA, 21 nt, synthetic construct
  source 1..21: mol_type = other RNA
  modified_base 1: mod_base = OTHER; note = 2'-O-methyluridine-3'-phosphorothioate
  modified_base 2: mod_base = OTHER; note = 2'-O-methyladenosine-3'-phosphorothioate
  modified_base 3: mod_base = OTHER; note = 2'-O-methyluridine-3'-phosphate
  modified_base 4: mod_base = OTHER; note = 2'-O-methyladenosine-3'-phosphate
  modified_base 5: mod_base = OTHER; note = 2'-O-methyladenosine-3'-phosphate
  modified_base 6: mod_base = OTHER; note = 2'-O-methyluridine-3'-phosphate
  modified_base 7: mod_base = OTHER; note = 2'-deoxy-2'-fluoroguanosine-3'-phosphate
  modified_base 8: mod_base = OTHER; note = 2'-O-methylguanosine-3'-phosphate
  modified_base 9: mod_base = OTHER; note = 2'-deoxy-2'-fluoroadenosine-3'-phosphate
  modified_base 10: mod_base = OTHER; note = 2'-deoxy-2'-fluoroadenosine-3'-phosphate
  modified_base 11: mod_base = OTHER; note = 2'-deoxy-2'-fluorouridine-3'-phosphate
  modified_base 12: mod_base = OTHER; note = 2'-O-methyladenosine-3'-phosphate
  modified_base 13: mod_base = OTHER; note = 2'-O-methyladenosine-3'-phosphate
  modified_base 14: mod_base = OTHER; note = 2'-O-methylcytidine-3'-phosphate
  modified_base 15: mod_base = OTHER; note = 2'-O-methyluridine-3'-phosphate
  modified_base 16: mod_base = OTHER; note = 2'-O-methylguanosine-3'-phosphate
  modified_base 17: mod_base = OTHER; note = 2'-O-methyladenosine-3'-phosphate
  modified_base 18: mod_base = OTHER; note = 2'-O-methylcytidine-3'-phosphate
  modified_base 19: mod_base = OTHER; note = 2'-O-methyluridine-3'-phosphate
  modified_base 20: mod_base = OTHER; note = 2'-O-methylguanosine-3'-phosphate
  modified_base 21: mod_base = OTHER; note = 2'-O-methyluridine-3'-phosphate ((2S,4R)-1-[29-[[2-(acetylamino)-2-deoxy-beta-D-galactopyra nosyl]oxy]-14,14-bis[[3-[[3-[[5-[[2-(acetylamino)-2-deoxy-b eta-D-galactopyranosyl]oxy]-1-oxopentyl]amino]propyl]amino] -3-oxopropoxy]methyl]-1,12,19,25-tetraoxo-16-oxa-13,20,24-t riazanonacos-1-yl]-4-hydroxy-2-pyrrolidinyl)methyl ester
tataatggaataactgactgt

SEQ ID NO: 826 - RNA, 21 nt, synthetic construct
  source 1..21: mol_type = other RNA
  modified_base 1: mod_base = OTHER; note = 2'-O-methylguanosine-3'-phosphorothioate
  modified_base 2: mod_base = OTHER; note = 2'-O-methyladenosine-3'-phosphorothioate
  modified_base 3: mod_base = OTHER; note = 2'-O-methyladenosine-3'-phosphate
  modified_base 4: mod_base = OTHER; note = 2'-O-methyluridine-3'-phosphate
  modified_base 5: mod_base = OTHER; note = 2'-O-methyladenosine-3'-phosphate
  modified_base 6: mod_base = OTHER; note = 2'-O-methyladenosine-3'-phosphate
  modified_base 7: mod_base = OTHER; note = 2'-deoxy-2'-fluorocytidine-3'-phosphate
  modified_base 8: mod_base = OTHER; note = 2'-O-methyluridine-3'-phosphate
  modified_base 9: mod_base = OTHER; note = 2'-deoxy-2'-fluoroguanosine-3'-phosphate
  modified_base 10: mod_base = OTHER; note = 2'-deoxy-2'-fluoroadenosine-3'-phosphate
  modified_base 11: mod_base = OTHER; note = 2'-deoxy-2'-fluorocytidine-3'-phosphate
  modified_base 12: mod_base = OTHER; note = 2'-O-methyluridine-3'-phosphate
  modified_base 13: mod_base = OTHER; note = 2'-O-methylguanosine-3'-phosphate
  modified_base 14: mod_base = OTHER; note = 2'-O-methylguanosine-3'-phosphate
  modified_base 15: mod_base = OTHER; note = 2'-O-methylguanosine-3'-phosphate
  modified_base 16: mod_base = OTHER; note = 2'-O-methyluridine-3'-phosphate
  modified_base 17: mod_base = OTHER; note = 2'-O-methyluridine-3'-phosphate
  modified_base 18: mod_base = OTHER; note = 2'-O-methyluridine-3'-phosphate
  modified_base 19: mod_base = OTHER; note = 2'-O-methyladenosine-3'-phosphate
  modified_base 20: mod_base = OTHER; note = 2'-O-methyluridine-3'-phosphate
  modified_base 21: mod_base = OTHER; note = 2'-O-methyluridine-3'-phosphate ((2S,4R)-1-[29-[[2-(acetylamino)-2-deoxy-beta-D-galactopyra nosyl]oxy]-14,14-bis[[3-[[3-[[5-[[2-(acetylamino)-2-deoxy-b eta-D-galactopyranosyl]oxy]-1-oxopentyl]amino]propyl]amino] -3-oxopropoxy]methyl]-1,12,19,25-tetraoxo-16-oxa-13,20,24-t riazanonacos-1-yl]-4-hydroxy-2-pyrrolidinyl)methyl ester
gaataactgactgggtttatt

SEQ ID NO: 827 - RNA, 21 nt, synthetic construct
  source 1..21: mol_type = other RNA
  modified_base 1: mod_base = OTHER; note = 2'-O-methylguanosine-3'-phosphorothioate
  modified_base 2: mod_base = OTHER; note = 2'-O-methyladenosine-3'-phosphorothioate
  modified_base 3: mod_base = OTHER; note = 2'-O-methylcytidine-3'-phosphate
  modified_base 4: mod_base = OTHER; note = 2'-O-methyluridine-3'-phosphate
  modified_base 5: mod_base = OTHER; note = 2'-O-methylguanosine-3'-phosphate
  modified_base 6: mod_base = OTHER; note = 2'-O-methylguanosine-3'-phosphate
  modified_base 7: mod_base = OTHER; note = 2'-deoxy-2'-fluoroguanosine-3'-phosphate
  modified_base 8: mod_base = OTHER; note = 2'-O-methyluridine-3'-phosphate
  modified_base 9: mod_base = OTHER; note = 2'-deoxy-2'-fluorouridine-3'-phosphate
  modified_base 10: mod_base = OTHER; note = 2'-deoxy-2'-fluorouridine-3'-phosphate
  modified_base 11: mod_base = OTHER; note = 2'-deoxy-2'-fluoroadenosine-3'-phosphate
  modified_base 12: mod_base = OTHER; note = 2'-O-methyluridine-3'-phosphate
  modified_base 13: mod_base = OTHER; note = 2'-O-methylguanosine-3'-phosphate
  modified_base 14: mod_base = OTHER; note = 2'-O-methyladenosine-3'-phosphate
  modified_base 15: mod_base = OTHER; note = 2'-O-methyladenosine-3'-phosphate
  modified_base 16: mod_base = OTHER; note = 2'-O-methylguanosine-3'-phosphate
  modified_base 17: mod_base = OTHER; note = 2'-O-methyladenosine-3'-phosphate
  modified_base 18: mod_base = OTHER; note = 2'-O-methylguanosine-3'-phosphate
  modified_base 19: mod_base = OTHER; note = 2'-O-methylguanosine-3'-phosphate
  modified_base 20: mod_base = OTHER; note = 2'-O-methyladenosine-3'-phosphate
  modified_base 21: mod_base = OTHER; note = 2'-O-methyluridine-3'-phosphate ((2S,4R)-1-[29-[[2-(acetylamino)-2-deoxy-beta-D-galactopyra nosyl]oxy]-14,14-bis[[3-[[3-[[5-[[2-(acetylamino)-2-deoxy-b eta-D-galactopyranosyl]oxy]-1-oxopentyl]amino]propyl]amino] -3-oxopropoxy]methyl]-1,12,19,25-tetraoxo-16-oxa-13,20,24-t riazanonacos-1-yl]-4-hydroxy-2-pyrrolidinyl)methyl ester
gactgggtttatgaagaggat

SEQ ID NO: 828 - RNA, 21 nt, synthetic construct
  source 1..21: mol_type = other RNA
  modified_base 1: mod_base = OTHER; note = 2'-O-methylguanosine-3'-phosphorothioate
  modified_base 2: mod_base = OTHER; note = 2'-O-methyluridine-3'-phosphorothioate
  modified_base 3: mod_base = OTHER; note = 2'-O-methyluridine-3'-phosphate
  modified_base 4: mod_base = OTHER; note = 2'-O-methyluridine-3'-phosphate
  modified_base 5: mod_base = OTHER; note = 2'-O-methyladenosine-3'-phosphate
  modified_base 6: mod_base = OTHER; note = 2'-O-methyluridine-3'-phosphate
  modified_base 7: mod_base = OTHER; note = 2'-deoxy-2'-fluoroguanosine-3'-phosphate
  modified_base 8: mod_base = OTHER; note = 2'-O-methyladenosine-3'-phosphate
  modified_base 9: mod_base = OTHER; note = 2'-deoxy-2'-fluoroadenosine-3'-phosphate
  modified_base 10: mod_base = OTHER; note = 2'-deoxy-2'-fluoroguanosine-3'-phosphate
  modified_base 11: mod_base = OTHER; note = 2'-deoxy-2'-fluoroadenosine-3'-phosphate
  modified_base 12: mod_base = OTHER; note = 2'-O-methylguanosine-3'-phosphate
  modified_base 13: mod_base = OTHER; note = 2'-O-methylguanosine-3'-phosphate
  modified_base 14: mod_base = OTHER; note = 2'-O-methyladenosine-3'-phosphate
  modified_base 15: mod_base = OTHER; note = 2'-O-methyladenosine-3'-phosphate
  modified_base 16: mod_base = OTHER; note = 2'-O-methylguanosine-3'-phosphate
  modified_base 17: mod_base = OTHER; note = 2'-O-methyluridine-3'-phosphate
  modified_base 18: mod_base = OTHER; note = 2'-O-methylcytidine-3'-phosphate
  modified_base 19: mod_base = OTHER; note = 2'-O-methyluridine-3'-phosphate
  modified_base 20: mod_base = OTHER; note = 2'-O-methyluridine-3'-phosphate
  modified_base 21: mod_base = OTHER; note = 2'-O-methyluridine-3'-phosphate ((2S,4R)-1-[29-[[2-(acetylamino)-2-deoxy-beta-D-galactopyra nosyl]oxy]-14,14-bis[[3-[[3-[[5-[[2-(acetylamino)-2-deoxy-b eta-D-galactopyranosyl]oxy]-1-oxopentyl]amino]propyl]amino] -3-oxopropoxy]methyl]-1,12,19,25-tetraoxo-16-oxa-13,20,24-t riazanonacos-1-yl]-4-hydroxy-2-pyrrolidinyl)methyl ester
gtttatgaagaggaagtcttt

SEQ ID NO: 829 - RNA, 21 nt, synthetic construct
  source 1..21: mol_type = other RNA
  modified_base 1: mod_base = OTHER; note = 2'-O-methylguanosine-3'-phosphorothioate
  modified_base 2: mod_base = OTHER; note = 2'-O-methyladenosine-3'-phosphorothioate
  modified_base 3: mod_base = OTHER; note = 2'-O-methyladenosine-3'-phosphate
  modified_base 4: mod_base = OTHER; note = 2'-O-methylguanosine-3'-phosphate
  modified_base 5: mod_base = OTHER; note = 2'-O-methyladenosine-3'-phosphate
  modified_base 6: mod_base = OTHER; note = 2'-O-methylguanosine-3'-phosphate
  modified_base 7: mod_base = OTHER; note = 2'-deoxy-2'-fluoroguanosine-3'-phosphate
  modified_base 8: mod_base = OTHER; note = 2'-O-methyladenosine-3'-phosphate
  modified_base 9: mod_base = OTHER; note = 2'-deoxy-2'-fluoroadenosine-3'-phosphate
  modified_base 10: mod_base = OTHER; note = 2'-deoxy-2'-fluoroguanosine-3'-phosphate
  modified_base 11: mod_base = OTHER; note = 2'-deoxy-2'-fluorouridine-3'-phosphate
  modified_base 12: mod_base = OTHER; note = 2'-O-methylcytidine-3'-phosphate
  modified_base 13: mod_base = OTHER; note = 2'-O-methyluridine-3'-phosphate
  modified_base 14: mod_base = OTHER; note = 2'-O-methyluridine-3'-phosphate
  modified_base 15: mod_base = OTHER; note = 2'-O-methylcytidine-3'-phosphate
  modified_base 16: mod_base = OTHER; note = 2'-O-methyladenosine-3'-phosphate
  modified_base 17: mod_base = OTHER; note = 2'-O-methylguanosine-3'-phosphate
  modified_base 18: mod_base = OTHER; note = 2'-O-methyluridine-3'-phosphate
  modified_base 19: mod_base = OTHER; note = 2'-O-methylguanosine-3'-phosphate
  modified_base 20: mod_base = OTHER; note = 2'-O-methylcytidine-3'-phosphate
  modified_base 21: mod_base = OTHER; note = 2'-O-methyluridine-3'-phosphate ((2S,4R)-1-[29-[[2-(acetylamino)-2-deoxy-beta-D-galactopyra nosyl]oxy]-14,14-bis[[3-[[3-[[5-[[2-(acetylamino)-2-deoxy-b eta-D-galactopyranosyl]oxy]-1-oxopentyl]amino]propyl]amino] -3-oxopropoxy]methyl]-1,12,19,25-tetraoxo-16-oxa-13,20,24-t riazanonacos-1-yl]-4-hydroxy-2-pyrrolidinyl)methyl ester
gaagaggaagtcttcagtgct

SEQ ID NO: 830 - RNA, 21 nt, synthetic construct
  source 1..21: mol_type = other RNA
  modified_base 1: mod_base = OTHER; note = 2'-O-methyladenosine-3'-phosphorothioate
  modified_base 2: mod_base = OTHER; note = 2'-O-methyladenosine-3'-phosphorothioate
  modified_base 3: mod_base = OTHER; note = 2'-O-methylguanosine-3'-phosphate
  modified_base 4: mod_base = OTHER; note = 2'-O-methyluridine-3'-phosphate
  modified_base 5: mod_base = OTHER; note = 2'-O-methylcytidine-3'-phosphate
  modified_base 6: mod_base = OTHER; note = 2'-O-methyluridine-3'-phosphate
  modified_base 7: mod_base = OTHER; note = 2'-deoxy-2'-fluorouridine-3'-phosphate
  modified_base 8: mod_base = OTHER; note = 2'-O-methylcytidine-3'-phosphate
  modified_base 9: mod_base = OTHER; note = 2'-deoxy-2'-fluoroadenosine-3'-phosphate
  modified_base 10: mod_base = OTHER; note = 2'-deoxy-2'-fluoroguanosine-3'-phosphate
  modified_base 11: mod_base = OTHER; note = 2'-deoxy-2'-fluorouridine-3'-phosphate
  modified_base 12: mod_base = OTHER; note = 2'-O-methylguanosine-3'-phosphate
  modified_base 13: mod_base = OTHER; note = 2'-O-methylcytidine-3'-phosphate
  modified_base 14: mod_base = OTHER; note = 2'-O-methylcytidine-3'-phosphate
  modified_base 15: mod_base = OTHER; note = 2'-O-methyluridine-3'-phosphate
  modified_base 16: mod_base = OTHER; note = 2'-O-methyladenosine-3'-phosphate
  modified_base 17: mod_base = OTHER; note = 2'-O-methylcytidine-3'-phosphate
  modified_base 18: mod_base = OTHER; note = 2'-O-methyluridine-3'-phosphate
  modified_base 19: mod_base = OTHER; note = 2'-O-methylcytidine-3'-phosphate
  modified_base 20: mod_base = OTHER; note = 2'-O-methyluridine-3'-phosphate
  modified_base 21: mod_base = OTHER; note = 2'-O-methyluridine-3'-phosphate ((2S,4R)-1-[29-[[2-(acetylamino)-2-deoxy-beta-D-galactopyra nosyl]oxy]-14,14-bis[[3-[[3-[[5-[[2-(acetylamino)-2-deoxy-b eta-D-galactopyranosyl]oxy]-1-oxopentyl]amino]propyl]amino] -3-oxopropoxy]methyl]-1,12,19,25-tetraoxo-16-oxa-13,20,24-t riazanonacos-1-yl]-4-hydroxy-2-pyrrolidinyl)methyl ester
aagtcttcagtgcctactctt

SEQ ID NO: 831 - RNA, 21 nt, synthetic construct
  source 1..21: mol_type = other RNA
  modified_base 1: mod_base = OTHER; note = 2'-O-methyluridine-3'-phosphorothioate
  modified_base 2: mod_base = OTHER; note = 2'-O-methylguanosine-3'-phosphorothioate
  modified_base 3: mod_base = OTHER; note = 2'-O-methylcytidine-3'-phosphate
  modified_base 4: mod_base = OTHER; note = 2'-O-methylcytidine-3'-phosphate
  modified_base 5: mod_base = OTHER; note = 2'-O-methyluridine-3'-phosphate
  modified_base 6: mod_base = OTHER; note = 2'-O-methyladenosine-3'-phosphate
  modified_base 7: mod_base = OTHER; note = 2'-deoxy-2'-fluorocytidine-3'-phosphate
  modified_base 8: mod_base = OTHER; note = 2'-O-methyluridine-3'-phosphate
  modified_base 9: mod_base = OTHER; note = 2'-deoxy-2'-fluorocytidine-3'-phosphate
  modified_base 10: mod_base = OTHER; note = 2'-deoxy-2'-fluorouridine-3'-phosphate
  modified_base 11: mod_base = OTHER; note = 2'-deoxy-2'-fluoroguanosine-3'-phosphate
  modified_base 12: mod_base = OTHER; note = 2'-O-methylcytidine-3'-phosphate
  modified_base 13: mod_base = OTHER; note = 2'-O-methyluridine-3'-phosphate
  modified_base 14: mod_base = OTHER; note = 2'-O-methylcytidine-3'-phosphate
  modified_base 15: mod_base = OTHER; note = 2'-O-methyluridine-3'-phosphate
  modified_base 16: mod_base = OTHER; note = 2'-O-methylguanosine-3'-phosphate
  modified_base 17: mod_base = OTHER; note = 2'-O-methyluridine-3'-phosphate
  modified_base 18: mod_base = OTHER; note = 2'-O-methylguanosine-3'-phosphate
  modified_base 19: mod_base = OTHER; note = 2'-O-methylguanosine-3'-phosphate
  modified_base 20: mod_base = OTHER; note = 2'-O-methyluridine-3'-phosphate
  modified_base 21: mod_base = OTHER; note = 2'-O-methyluridine-3'-phosphate ((2S,4R)-1-[29-[[2-(acetylamino)-2-deoxy-beta-D-galactopyra nosyl]oxy]-14,14-bis[[3-[[3-[[5-[[2-(acetylamino)-2-deoxy-b eta-D-galactopyranosyl]oxy]-1-oxopentyl]amino]propyl]amino] -3-oxopropoxy]methyl]-1,12,19,25-tetraoxo-16-oxa-13,20,24-t riazanonacos-1-yl]-4-hydroxy-2-pyrrolidinyl)methyl ester
tgcctactctgctctgtggtt

SEQ ID NO: 832 - RNA, 21 nt, synthetic construct
  source 1..21: mol_type = other RNA
  modified_base 1: mod_base = OTHER; note = 2'-O-methyluridine-3'-phosphorothioate
  modified_base 2: mod_base = OTHER; note = 2'-O-methylcytidine-3'-phosphorothioate
  modified_base 3: mod_base = OTHER; note = 2'-O-methyluridine-3'-phosphate
  modified_base 4: mod_base = OTHER; note = 2'-O-methylguanosine-3'-phosphate
  modified_base 5: mod_base = OTHER; note = 2'-O-methyluridine-3'-phosphate
  modified_base 6: mod_base = OTHER; note = 2'-O-methylguanosine-3'-phosphate
  modified_base 7: mod_base = OTHER; note = 2'-deoxy-2'-fluoroguanosine-3'-phosphate
  modified_base 8: mod_base = OTHER; note = 2'-O-methyluridine-3'-phosphate
  modified_base 9: mod_base = OTHER; note = 2'-deoxy-2'-fluoroguanosine-3'-phosphate
  modified_base 10: mod_base = OTHER; note = 2'-deoxy-2'-fluoroguanosine-3'-phosphate
  modified_base 11: mod_base = OTHER; note = 2'-deoxy-2'-fluorouridine-3'-phosphate
  modified_base 12: mod_base = OTHER; note = 2'-O-methylcytidine-3'-phosphate
  modified_base 13: mod_base = OTHER; note = 2'-O-methyluridine-3'-phosphate
  modified_base 14: mod_base = OTHER; note = 2'-O-methylcytidine-3'-phosphate
  modified_base 15: mod_base = OTHER; note = 2'-O-methylcytidine-3'-phosphate
  modified_base 16: mod_base = OTHER; note = 2'-O-methyladenosine-3'-phosphate
  modified_base 17: mod_base = OTHER; note = 2'-O-methyladenosine-3'-phosphate
  modified_base 18: mod_base = OTHER; note = 2'-O-methyladenosine-3'-phosphate
  modified_base 19: mod_base = OTHER; note = 2'-O-methylcytidine-3'-phosphate
  modified_base 20: mod_base = OTHER; note = 2'-O-methylguanosine-3'-phosphate
  modified_base 21: mod_base = OTHER; note = 2'-O-methyluridine-3'-phosphate ((2S,4R)-1-[29-[[2-(acetylamino)-2-deoxy-beta-D-galactopyra nosyl]oxy]-14,14-bis[[3-[[3-[[5-[[2-(acetylamino)-2-deoxy-b eta-D-galactopyranosyl]oxy]-1-oxopentyl]amino]propyl]amino] -3-oxopropoxy]methyl]-1,12,19,25-tetraoxo-16-oxa-13,20,24-t riazanonacos-1-yl]-4-hydroxy-2-pyrrolidinyl)methyl ester
tctgtggtggtctccaaacgt

SEQ ID NO: 833 - RNA, 21 nt, synthetic construct
  source 1..21: mol_type = other RNA
  modified_base 1: mod_base = OTHER; note = 2'-O-methylguanosine-3'-phosphorothioate
  modified_base 2: mod_base = OTHER; note = 2'-O-methylguanosine-3'-phosphorothioate
  modified_base 3: mod_base = OTHER; note = 2'-O-methyluridine-3'-phosphate
  modified_base 4: mod_base = OTHER; note = 2'-O-methylcytidine-3'-phosphate
  modified_base 5: mod_base = OTHER; note = 2'-O-methyluridine-3'-phosphate
  modified_base 6: mod_base = OTHER; note = 2'-O-methylcytidine-3'-phosphate
  modified_base 7: mod_base = OTHER; note = 2'-deoxy-2'-fluorocytidine-3'-phosphate
  modified_base 8: mod_base = OTHER; note = 2'-O-methyladenosine-3'-phosphate
  modified_base 9: mod_base = OTHER; note = 2'-deoxy-2'-fluoroadenosine-3'-phosphate
  modified_base 10: mod_base = OTHER; note = 2'-deoxy-2'-fluoroadenosine-3'-phosphate
  modified_base 11: mod_base = OTHER; note = 2'-deoxy-2'-fluorocytidine-3'-phosphate
  modified_base 12: mod_base = OTHER; note = 2'-O-methylguanosine-3'-phosphate
  modified_base 13: mod_base = OTHER; note = 2'-O-methylguanosine-3'-phosphate
  modified_base 14: mod_base = OTHER; note = 2'-O-methylcytidine-3'-phosphate
  modified_base 15: mod_base = OTHER; note = 2'-O-methyladenosine-3'-phosphate
  modified_base 16: mod_base = OTHER; note = 2'-O-methylcytidine-3'-phosphate
  modified_base 17: mod_base = OTHER; note = 2'-O-methyluridine-3'-phosphate
  modified_base 18: mod_base = OTHER; note = 2'-O-methyluridine-3'-phosphate
  modified_base 19: mod_base = OTHER; note = 2'-O-methyluridine-3'-phosphate
  modified_base 20: mod_base = OTHER; note = 2'-O-methyluridine-3'-phosphate
  modified_base 21: mod_base = OTHER; note = 2'-O-methyluridine-3'-phosphate ((2S,4R)-1-[29-[[2-(acetylamino)-2-deoxy-beta-D-galactopyra nosyl]oxy]-14,14-bis[[3-[[3-[[5-[[2-(acetylamino)-2-deoxy-b eta-D-galactopyranosyl]oxy]-1-oxopentyl]amino]propyl]amino] -3-oxopropoxy]methyl]-1,12,19,25-tetraoxo-16-oxa-13,20,24-t riazanonacos-1-yl]-4-hydroxy-2-pyrrolidinyl)methyl ester
ggtctccaaacggcacttttt

SEQ ID NO: 834 - RNA, 21 nt, synthetic construct
  source 1..21: mol_type = other RNA
  modified_base 1: mod_base = OTHER; note = 2'-O-methyluridine-3'-phosphorothioate
  modified_base 2: mod_base = OTHER; note = 2'-O-methyladenosine-3'-phosphorothioate
  modified_base 3: mod_base = OTHER; note = 2'-O-methylguanosine-3'-phosphate
  modified_base 4: mod_base = OTHER; note = 2'-O-methylcytidine-3'-phosphate
  modified_base 5: mod_base = OTHER; note = 2'-O-methyladenosine-3'-phosphate
  modified_base 6: mod_base = OTHER; note = 2'-O-methyluridine-3'-phosphate
  modified_base 7: mod_base = OTHER; note = 2'-deoxy-2'-fluoroadenosine-3'-phosphate
  modified_base 8: mod_base = OTHER; note = 2'-O-methyluridine-3'-phosphate
  modified_base 9: mod_base = OTHER; note = 2'-deoxy-2'-fluoroguanosine-3'-phosphate
  modified_base 10: mod_base = OTHER; note = 2'-deoxy-2'-fluorocytidine-3'-phosphate
  modified_base 11: mod_base = OTHER; note = 2'-deoxy-2'-fluorocytidine-3'-phosphate
  modified_base 12: mod_base = OTHER; note = 2'-O-methylcytidine-3'-phosphate
  modified_base 13: mod_base = OTHER; note = 2'-O-methyladenosine-3'-phosphate
  modified_base 14: mod_base = OTHER; note = 2'-O-methyladenosine-3'-phosphate
  modified_base 15: mod_base = OTHER; note = 2'-O-methyluridine-3'-phosphate
  modified_base 16: mod_base = OTHER; note = 2'-O-methyluridine-3'-phosphate
  modified_base 17: mod_base = OTHER; note = 2'-O-methyluridine-3'-phosphate
  modified_base 18: mod_base = OTHER; note = 2'-O-methyladenosine-3'-phosphate
  modified_base 19: mod_base = OTHER; note = 2'-O-methyladenosine-3'-phosphate
  modified_base 20: mod_base = OTHER; note = 2'-O-methylcytidine-3'-phosphate
  modified_base 21: mod_base = OTHER; note = 2'-O-methyluridine-3'-phosphate ((2S,4R)-1-[29-[[2-(acetylamino)-2-deoxy-beta-D-galactopyra nosyl]oxy]-14,14-bis[[3-[[3-[[5-[[2-(acetylamino)-2-deoxy-b eta-D-galactopyranosyl]oxy]-1-oxopentyl]amino]propyl]amino] -3-oxopropoxy]methyl]-1,12,19,25-tetraoxo-16-oxa-13,20,24-t riazanonacos-1-yl]-4-hydroxy-2-pyrrolidinyl)methyl ester
tagcatatgcccaatttaact

SEQ ID NO: 835 - RNA, 21 nt, synthetic construct
  source 1..21: mol_type = other RNA
  modified_base 1: mod_base = OTHER; note = 2'-O-methyluridine-3'-phosphorothioate
  modified_base 2: mod_base = OTHER; note = 2'-O-methylguanosine-3'-phosphorothioate
  modified_base 3: mod_base = OTHER; note = 2'-O-methylcytidine-3'-phosphate
  modified_base 4: mod_base = OTHER; note = 2'-O-methylcytidine-3'-phosphate
  modified_base 5: mod_base = OTHER; note = 2'-O-methylcytidine-3'-phosphate
  modified_base 6: mod_base = OTHER; note = 2'-O-methyladenosine-3'-phosphate
  modified_base 7: mod_base = OTHER; note = 2'-deoxy-2'-fluoroadenosine-3'-phosphate
  modified_base 8: mod_base = OTHER; note = 2'-O-methyluridine-3'-phosphate
  modified_base 9: mod_base = OTHER; note = 2'-deoxy-2'-fluorouridine-3'-phosphate
  modified_base 10: mod_base = OTHER; note = 2'-deoxy-2'-fluorouridine-3'-phosphate
  modified_base 11: mod_base = OTHER; note = 2'-deoxy-2'-fluoroadenosine-3'-phosphate
  modified_base 12: mod_base = OTHER; note = 2'-O-methyladenosine-3'-phosphate
  modified_base 13: mod_base = OTHER; note = 2'-O-methylcytidine-3'-phosphate
  modified_base 14: mod_base = OTHER; note = 2'-O-methylguanosine-3'-phosphate
  modified_base 15: mod_base = OTHER; note = 2'-O-methyladenosine-3'-phosphate
  modified_base 16: mod_base = OTHER; note = 2'-O-methylcytidine-3'-phosphate
  modified_base 17: mod_base = OTHER; note = 2'-O-methyladenosine-3'-phosphate
  modified_base 18: mod_base = OTHER; note = 2'-O-methylcytidine-3'-phosphate
  modified_base 19: mod_base = OTHER; note = 2'-O-methyladenosine-3'-phosphate
  modified_base 20: mod_base = OTHER; note = 2'-O-methylguanosine-3'-phosphate
  modified_base 21: mod_base = OTHER; note = 2'-O-methyluridine-3'-phosphate ((2S,4R)-1-[29-[[2-(acetylamino)-2-deoxy-beta-D-galactopyra nosyl]oxy]-14,14-bis[[3-[[3-[[5-[[2-(acetylamino)-2-deoxy-b eta-D-galactopyranosyl]oxy]-1-oxopentyl]amino]propyl]amino] -3-oxopropoxy]methyl]-1,12,19,25-tetraoxo-16-oxa-13,20,24-t riazanonacos-1-yl]-4-hydroxy-2-pyrrolidinyl)methyl ester
tgcccaatttaacgacacagt

SEQ ID NO: 836 - RNA, 21 nt, synthetic construct
  source 1..21: mol_type = other RNA
  modified_base 1: mod_base = OTHER; note = 2'-O-methyluridine-3'-phosphorothioate
  modified_base 2: mod_base = OTHER; note = 2'-O-methyluridine-3'-phosphorothioate
  modified_base 3: mod_base = OTHER; note = 2'-O-methyluridine-3'-phosphate
  modified_base 4: mod_base = OTHER; note = 2'-O-methyladenosine-3'-phosphate
  modified_base 5: mod_base = OTHER; note = 2'-O-methyladenosine-3'-phosphate
  modified_base 6: mod_base = OTHER; note = 2'-O-methylcytidine-3'-phosphate
  modified_base 7: mod_base = OTHER; note = 2'-deoxy-2'-fluoroguanosine-3'-phosphate
  modified_base 8: mod_base = OTHER; note = 2'-O-methyladenosine-3'-phosphate
  modified_base 9: mod_base = OTHER; note = 2'-deoxy-2'-fluorocytidine-3'-phosphate
  modified_base 10: mod_base = OTHER; note = 2'-deoxy-2'-fluoroadenosine-3'-phosphate
  modified_base 11: mod_base = OTHER; note = 2'-deoxy-2'-fluorocytidine-3'-phosphate
  modified_base 12: mod_base = OTHER; note = 2'-O-methyladenosine-3'-phosphate
  modified_base 13: mod_base = OTHER; note = 2'-O-methylguanosine-3'-phosphate
  modified_base 14: mod_base = OTHER; note = 2'-O-methyladenosine-3'-phosphate
  modified_base 15: mod_base = OTHER; note = 2'-O-methyladenosine-3'-phosphate
  modified_base 16: mod_base = OTHER; note = 2'-O-methylguanosine-3'-phosphate
  modified_base 17: mod_base = OTHER; note = 2'-O-methyluridine-3'-phosphate
  modified_base 18: mod_base = OTHER; note = 2'-O-methylcytidine-3'-phosphate
  modified_base 19: mod_base = OTHER; note = 2'-O-methylcytidine-3'-phosphate
  modified_base 20: mod_base = OTHER; note = 2'-O-methylcytidine-3'-phosphate
  modified_base 21: mod_base = OTHER; note = 2'-O-methyluridine-3'-phosphate ((2S,4R)-1-[29-[[2-(acetylamino)-2-deoxy-beta-D-galactopyra nosyl]oxy]-14,14-bis[[3-[[3-[[5-[[2-(acetylamino)-2-deoxy-b eta-D-galactopyranosyl]oxy]-1-oxopentyl]amino]propyl]amino] -3-oxopropoxy]methyl]-1,12,19,25-tetraoxo-16-oxa-13,20,24-t riazanonacos-1-yl]-4-hydroxy-2-pyrrolidinyl)methyl ester
tttaacgacacagaagtccct

SEQ ID NO: 837 - RNA, 21 nt, synthetic construct
  source 1..21: mol_type = other RNA
  modified_base 1: mod_base = OTHER; note = 2'-O-methyladenosine-3'-phosphorothioate
  modified_base 2: mod_base = OTHER; note = 2'-O-methylcytidine-3'-phosphorothioate
  modified_base 3: mod_base = OTHER; note = 2'-O-methyladenosine-3'-phosphate
  modified_base 4: mod_base = OTHER; note = 2'-O-methylguanosine-3'-phosphate
  modified_base 5: mod_base = OTHER; note = 2'-O-methyladenosine-3'-phosphate
  modified_base 6: mod_base = OTHER; note = 2'-O-methyladenosine-3'-phosphate
  modified_base 7: mod_base = OTHER; note = 2'-deoxy-2'-fluoroguanosine-3'-phosphate
  modified_base 8: mod_base = OTHER; note = 2'-O-methyluridine-3'-phosphate
  modified_base 9: mod_base = OTHER; note = 2'-deoxy-2'-fluorocytidine-3'-phosphate
  modified_base 10: mod_base = OTHER; note = 2'-deoxy-2'-fluorocytidine-3'-phosphate
  modified_base 11: mod_base = OTHER; note = 2'-deoxy-2'-fluorocytidine-3'-phosphate
  modified_base 12: mod_base = OTHER; note = 2'-O-methyladenosine-3'-phosphate
  modified_base 13: mod_base = OTHER; note = 2'-O-methylcytidine-3'-phosphate
  modified_base 14: mod_base = OTHER; note = 2'-O-methyluridine-3'-phosphate
  modified_base 15: mod_base = OTHER; note = 2'-O-methyluridine-3'-phosphate
  modified_base 16: mod_base = OTHER; note = 2'-O-methyladenosine-3'-phosphate
  modified_base 17: mod_base = OTHER; note = 2'-O-methyluridine-3'-phosphate
  modified_base 18: mod_base = OTHER; note = 2'-O-methyluridine-3'-phosphate
  modified_base 19: mod_base = OTHER; note = 2'-O-methylguanosine-3'-phosphate
  modified_base 20: mod_base = OTHER; note = 2'-O-methyladenosine-3'-phosphate
  modified_base 21: mod_base = OTHER; note = 2'-O-methyluridine-3'-phosphate ((2S,4R)-1-[29-[[2-(acetylamino)-2-deoxy-beta-D-galactopyra nosyl]oxy]-14,14-bis[[3-[[3-[[5-[[2-(acetylamino)-2-deoxy-b eta-D-galactopyranosyl]oxy]-1-oxopentyl]amino]propyl]amino] -3-oxopropoxy]methyl]-1,12,19,25-tetraoxo-16-oxa-13,20,24-t riazanonacos-1-yl]-4-hydroxy-2-pyrrolidinyl)methyl ester
acagaagtcccacttattgat

SEQ ID NO: 838 - RNA, 21 nt, synthetic construct
  source 1..21: mol_type = other RNA
  modified_base 1: mod_base = OTHER; note = 2'-O-methylguanosine-3'-phosphorothioate
  modified_base 2: mod_base = OTHER; note = 2'-O-methyluridine-3'-phosphorothioate
  modified_base 3: mod_base = OTHER; note = 2'-O-methylcytidine-3'-phosphate
  modified_base 4: mod_base = OTHER; note = 2'-O-methylcytidine-3'-phosphate
  modified_base 5: mod_base = OTHER; note = 2'-O-methylcytidine-3'-phosphate
  modified_base 6: mod_base = OTHER; note = 2'-O-methyladenosine-3'-phosphate
  modified_base 7: mod_base = OTHER; note = 2'-deoxy-2'-fluorocytidine-3'-phosphate
  modified_base 8: mod_base = OTHER; note = 2'-O-methyluridine-3'-phosphate
  modified_base 9: mod_base = OTHER; note = 2'-deoxy-2'-fluorouridine-3'-phosphate
  modified_base 10: mod_base = OTHER; note = 2'-deoxy-2'-fluoroadenosine-3'-phosphate
  modified_base 11: mod_base = OTHER; note = 2'-deoxy-2'-fluorouridine-3'-phosphate
  modified_base 12: mod_base = OTHER; note = 2'-O-methyluridine-3'-phosphate
  modified_base 13: mod_base = OTHER; note = 2'-O-methylguanosine-3'-phosphate
  modified_base 14: mod_base = OTHER; note = 2'-O-methyladenosine-3'-phosphate
  modified_base 15: mod_base = OTHER; note = 2'-O-methyladenosine-3'-phosphate
  modified_base 16: mod_base = OTHER; note = 2'-O-methyluridine-3'-phosphate
  modified_base 17: mod_base = OTHER; note = 2'-O-methyladenosine-3'-phosphate
  modified_base 18: mod_base = OTHER; note = 2'-O-methylcytidine-3'-phosphate
  modified_base 19: mod_base = OTHER; note = 2'-O-methyluridine-3'-phosphate
  modified_base 20: mod_base = OTHER; note = 2'-O-methylcytidine-3'-phosphate
  modified_base 21: mod_base = OTHER; note = 2'-O-methyluridine-3'-phosphate ((2S,4R)-1-[29-[[2-(acetylamino)-2-deoxy-beta-D-galactopyra nosyl]oxy]-14,14-bis[[3-[[3-[[5-[[2-(acetylamino)-2-deoxy-b eta-D-galactopyranosyl]oxy]-1-oxopentyl]amino]propyl]amino] -3-oxopropoxy]methyl]-1,12,19,25-tetraoxo-16-oxa-13,20,24-t riazanonacos-1-yl]-4-hydroxy-2-pyrrolidinyl)methyl ester
gtcccacttattgaatactct

SEQ ID NO: 839 - RNA, 21 nt, synthetic construct
  source 1..21: mol_type = other RNA
  modified_base 1: mod_base = OTHER; note = 2'-O-methyluridine-3'-phosphorothioate
  modified_base 2: mod_base = OTHER; note = 2'-O-methyladenosine-3'-phosphorothioate
  modified_base 3: mod_base = OTHER; note = 2'-O-methyluridine-3'-phosphate
  modified_base 4: mod_base = OTHER; note = 2'-O-methyluridine-3'-phosphate
  modified_base 5: mod_base = OTHER; note = 2'-O-methylguanosine-3'-phosphate
  modified_base 6: mod_base = OTHER; note = 2'-O-methyladenosine-3'-phosphate
  modified_base 7: mod_base = OTHER; note = 2'-deoxy-2'-fluoroadenosine-3'-phosphate
  modified_base 8: mod_base = OTHER; note = 2'-O-methyluridine-3'-phosphate
  modified_base 9: mod_base = OTHER; note = 2'-deoxy-2'-fluoroadenosine-3'-phosphate
  modified_base 10: mod_base = OTHER; note = 2'-deoxy-2'-fluorocytidine-3'-phosphate
  modified_base 11: mod_base = OTHER; note = 2'-deoxy-2'-fluorouridine-3'-phosphate
  modified_base 12: mod_base = OTHER; note = 2'-O-methylcytidine-3'-phosphate
  modified_base 13: mod_base = OTHER; note = 2'-O-methylcytidine-3'-phosphate
  modified_base 14: mod_base = OTHER; note = 2'-O-methyluridine-3'-phosphate
  modified_base 15: mod_base = OTHER; note = 2'-O-methyluridine-3'-phosphate
  modified_base 16: mod_base = OTHER; note = 2'-O-methylcytidine-3'-phosphate
  modified_base 17: mod_base = OTHER; note = 2'-O-methyluridine-3'-phosphate
  modified_base 18: mod_base = OTHER; note = 2'-O-methyladenosine-3'-phosphate
  modified_base 19: mod_base = OTHER; note = 2'-O-methylcytidine-3'-phosphate
  modified_base 20: mod_base = OTHER; note = 2'-O-methyluridine-3'-phosphate
  modified_base 21: mod_base = OTHER; note = 2'-O-methyluridine-3'-phosphate ((2S,4R)-1-[29-[[2-(acetylamino)-2-deoxy-beta-D-galactopyra nosyl]oxy]-14,14-bis[[3-[[3-[[5-[[2-(acetylamino)-2-deoxy-b eta-D-galactopyranosyl]oxy]-1-oxopentyl]amino]propyl]amino] -3-oxopropoxy]methyl]-1,12,19,25-tetraoxo-16-oxa-13,20,24-t riazanonacos-1-yl]-4-hydroxy-2-pyrrolidinyl)methyl ester
tattgaatactccttctactt

SEQ ID NO: 840 - RNA, 21 nt, synthetic construct
  source 1..21: mol_type = other RNA
  modified_base 1: mod_base = OTHER; note = 2'-O-methylcytidine-3'-phosphorothioate
  modified_base 2: mod_base = OTHER; note = 2'-O-methyluridine-3'-phosphorothioate
  modified_base 3: mod_base = OTHER; note = 2'-O-methylcytidine-3'-phosphate
  modified_base 4: mod_base = OTHER; note = 2'-O-methylcytidine-3'-phosphate
  modified_base 5: mod_base = OTHER; note = 2'-O-methyluridine-3'-phosphate
  modified_base 6: mod_base = OTHER; note = 2'-O-methyluridine-3'-phosphate
  modified_base 7: mod_base = OTHER; note = 2'-deoxy-2'-fluorocytidine-3'-phosphate
  modified_base 8: mod_base = OTHER; note = 2'-O-methyluridine-3'-phosphate
  modified_base 9: mod_base = OTHER; note = 2'-deoxy-2'-fluoroadenosine-3'-phosphate
  modified_base 10: mod_base = OTHER; note = 2'-deoxy-2'-fluorocytidine-3'-phosphate
  modified_base 11: mod_base = OTHER; note = 2'-deoxy-2'-fluorouridine-3'-phosphate
  modified_base 12: mod_base = OTHER; note = 2'-O-methylcytidine-3'-phosphate
  modified_base 13: mod_base = OTHER; note = 2'-O-methyluridine-3'-phosphate
  modified_base 14: mod_base = OTHER; note = 2'-O-methylguanosine-3'-phosphate
  modified_base 15: mod_base = OTHER; note = 2'-O-methyladenosine-3'-phosphate
  modified_base 16: mod_base = OTHER; note = 2'-O-methyluridine-3'-phosphate
  modified_base 17: mod_base = OTHER; note = 2'-O-methylguanosine-3'-phosphate
  modified_base 18: mod_base = OTHER; note = 2'-O-methyladenosine-3'-phosphate
  modified_base 19: mod_base = OTHER; note = 2'-O-methylguanosine-3'-phosphate
  modified_base 20: mod_base = OTHER; note = 2'-O-methyluridine-3'-phosphate
  modified_base 21: mod_base = OTHER; note = 2'-O-methyluridine-3'-phosphate ((2S,4R)-1-[29-[[2-(acetylamino)-2-deoxy-beta-D-galactopyra nosyl]oxy]-14,14-bis[[3-[[3-[[5-[[2-(acetylamino)-2-deoxy-b eta-D-galactopyranosyl]oxy]-1-oxopentyl]amino]propyl]amino] -3-oxopropoxy]methyl]-1,12,19,25-tetraoxo-16-oxa-13,20,24-t riazanonacos-1-yl]-4-hydroxy-2-pyrrolidinyl)methyl ester
ctccttctactctgatgagtt

SEQ ID NO: 841 - RNA, 21 nt, synthetic construct
  source 1..21: mol_type = other RNA
  modified_base 1: mod_base = OTHER; note = 2'-O-methylcytidine-3'-phosphorothioate
  modified_base 2: mod_base = OTHER; note = 2'-O-methyluridine-3'-phosphorothioate
  modified_base 3: mod_base = OTHER; note = 2'-O-methylguanosine-3'-phosphate
  modified_base 4: mod_base = OTHER; note = 2'-O-methyladenosine-3'-phosphate
  modified_base 5: mod_base = OTHER; note = 2'-O-methyluridine-3'-phosphate
  modified_base 6: mod_base = OTHER; note = 2'-O-methylguanosine-3'-phosphate
  modified_base 7: mod_base = OTHER; note = 2'-deoxy-2'-fluoroadenosine-3'-phosphate
  modified_base 8: mod_base = OTHER; note = 2'-O-methylguanosine-3'-phosphate
  modified_base 9: mod_base = OTHER; note = 2'-deoxy-2'-fluorouridine-3'-phosphate
  modified_base 10: mod_base = OTHER; note = 2'-deoxy-2'-fluorocytidine-3'-phosphate
  modified_base 11: mod_base = OTHER; note = 2'-deoxy-2'-fluoroadenosine-3'-phosphate
  modified_base 12: mod_base = OTHER; note = 2'-O-methylcytidine-3'-phosphate
  modified_base 13: mod_base = OTHER; note = 2'-O-methyluridine-3'-phosphate
  modified_base 14: mod_base = OTHER; note = 2'-O-methylguanosine-3'-phosphate
  modified_base 15: mod_base = OTHER; note = 2'-O-methylcytidine-3'-phosphate
  modified_base 16: mod_base = OTHER; note = 2'-O-methyladenosine-3'-phosphate
  modified_base 17: mod_base = OTHER; note = 2'-O-methylguanosine-3'-phosphate
  modified_base 18: mod_base = OTHER; note = 2'-O-methyluridine-3'-phosphate
  modified_base 19: mod_base = OTHER; note = 2'-O-methyladenosine-3'-phosphate
  modified_base 20: mod_base = OTHER; note = 2'-O-methylcytidine-3'-phosphate
  modified_base 21: mod_base = OTHER; note = 2'-O-methyluridine-3'-phosphate ((2S,4R)-1-[29-[[2-(acetylamino)-2-deoxy-beta-D-galactopyra nosyl]oxy]-14,14-bis[[3-[[3-[[5-[[2-(acetylamino)-2-deoxy-b eta-D-galactopyranosyl]oxy]-1-oxopentyl]amino]propyl]amino] -3-oxopropoxy]methyl]-1,12,19,25-tetraoxo-16-oxa-13,20,24-t riazanonacos-1-yl]-4-hydroxy-2-pyrrolidinyl)methyl ester
ctgatgagtcactgcagtact

SEQ ID NO: 842 - RNA, 21 nt, synthetic construct
  source 1..21: mol_type = other RNA
  modified_base 1: mod_base = OTHER; note = 2'-O-methyluridine-3'-phosphorothioate
  modified_base 2: mod_base = OTHER; note = 2'-O-methylcytidine-3'-phosphorothioate
  modified_base 3: mod_base = OTHER; note = 2'-O-methyladenosine-3'-phosphate
  modified_base 4: mod_base = OTHER; note = 2'-O-methylcytidine-3'-phosphate
  modified_base 5: mod_base = OTHER; note = 2'-O-methyluridine-3'-phosphate
  modified_base 6: mod_base = OTHER; note = 2'-O-methylguanosine-3'-phosphate
  modified_base 7: mod_base = OTHER; note = 2'-deoxy-2'-fluorocytidine-3'-phosphate
  modified_base 8: mod_base = OTHER; note = 2'-O-methyladenosine-3'-phosphate
  modified_base 9: mod_base = OTHER; note = 2'-deoxy-2'-fluoroguanosine-3'-phosphate
  modified_base 10: mod_base = OTHER; note = 2'-deoxy-2'-fluorouridine-3'-phosphate
  modified_base 11: mod_base = OTHER; note = 2'-deoxy-2'-fluoroadenosine-3'-phosphate
  modified_base 12: mod_base = OTHER; note = 2'-O-methylcytidine-3'-phosphate
  modified_base 13: mod_base = OTHER; note = 2'-O-methylcytidine-3'-phosphate
  modified_base 14: mod_base = OTHER; note = 2'-O-methylcytidine-3'-phosphate
  modified_base 15: mod_base = OTHER; note = 2'-O-methyladenosine-3'-phosphate
  modified_base 16: mod_base = OTHER; note = 2'-O-methyladenosine-3'-phosphate
  modified_base 17: mod_base = OTHER; note = 2'-O-methyladenosine-3'-phosphate
  modified_base 18: mod_base = OTHER; note = 2'-O-methylguanosine-3'-phosphate
  modified_base 19: mod_base = OTHER; note = 2'-O-methyladenosine-3'-phosphate
  modified_base 20: mod_base = OTHER; note = 2'-O-methylcytidine-3'-phosphate
  modified_base 21: mod_base = OTHER; note = 2'-O-methyluridine-3'-phosphate ((2S,4R)-1-[29-[[2-(acetylamino)-2-deoxy-beta-D-galactopyra nosyl]oxy]-14,14-bis[[3-[[3-[[5-[[2-(acetylamino)-2-deoxy-b eta-D-galactopyranosyl]oxy]-1-oxopentyl]amino]propyl]amino] -3-oxopropoxy]methyl]-1,12,19,25-tetraoxo-16-oxa-13,20,24-t riazanonacos-1-yl]-4-hydroxy-2-pyrrolidinyl)methyl ester
tcactgcagtacccaaagact

SEQ ID NO: 843 - RNA, 21 nt, synthetic construct
  source 1..21: mol_type = other RNA
  modified_base 1: mod_base = OTHER; note = 2'-O-methyladenosine-3'-phosphorothioate
  modified_base 2: mod_base = OTHER; note = 2'-O-methylguanosine-3'-phosphorothioate
  modified_base 3: mod_base = OTHER; note = 2'-O-methyluridine-3'-phosphate
  modified_base 4: mod_base = OTHER; note = 2'-O-methyladenosine-3'-phosphate
  modified_base 5: mod_base = OTHER; note = 2'-O-methylcytidine-3'-phosphate
  modified_base 6: mod_base = OTHER; note = 2'-O-methylcytidine-3'-phosphate
  modified_base 7: mod_base = OTHER; note = 2'-deoxy-2'-fluorocytidine-3'-phosphate
  modified_base 8: mod_base = OTHER; note = 2'-O-methyladenosine-3'-phosphate
  modified_base 9: mod_base = OTHER; note = 2'-deoxy-2'-fluoroadenosine-3'-phosphate
  modified_base 10: mod_base = OTHER; note = 2'-deoxy-2'-fluoroadenosine-3'-phosphate
  modified_base 11: mod_base = OTHER; note = 2'-deoxy-2'-fluoroguanosine-3'-phosphate
  modified_base 12: mod_base = OTHER; note = 2'-O-methyladenosine-3'-phosphate
  modified_base 13: mod_base = OTHER; note = 2'-O-methylcytidine-3'-phosphate
  modified_base 14: mod_base = OTHER; note = 2'-O-methyluridine-3'-phosphate
  modified_base 15: mod_base = OTHER; note = 2'-O-methylguanosine-3'-phosphate
  modified_base 16: mod_base = OTHER; note = 2'-O-methyluridine-3'-phosphate
  modified_base 17: mod_base = OTHER; note = 2'-O-methyladenosine-3'-phosphate
  modified_base 18: mod_base = OTHER; note = 2'-O-methylcytidine-3'-phosphate
  modified_base 19: mod_base = OTHER; note = 2'-O-methylguanosine-3'-phosphate
  modified_base 20: mod_base = OTHER; note = 2'-O-methylguanosine-3'-phosphate
  modified_base 21: mod_base = OTHER; note = 2'-O-methyluridine-3'-phosphate ((2S,4R)-1-[29-[[2-(acetylamino)-2-deoxy-beta-D-galactopyra nosyl]oxy]-14,14-bis[[3-[[3-[[5-[[2-(acetylamino)-2-deoxy-b eta-D-galactopyranosyl]oxy]-1-oxopentyl]amino]propyl]amino] -3-oxopropoxy]methyl]-1,12,19,25-tetraoxo-16-oxa-13,20,24-t riazanonacos-1-yl]-4-hydroxy-2-pyrrolidinyl)methyl ester
agtacccaaagactgtacggt

SEQ ID NO: 844 - RNA, 21 nt, synthetic construct
  source 1..21: mol_type = other RNA
  modified_base 1: mod_base = OTHER; note = 2'-O-methyladenosine-3'-phosphorothioate
  modified_base 2: mod_base = OTHER; note = 2'-O-methylguanosine-3'-phosphorothioate
  modified_base 3: mod_base = OTHER; note = 2'-O-methyladenosine-3'-phosphate
  modified_base 4: mod_base = OTHER; note = 2'-O-methylcytidine-3'-phosphate
  modified_base 5: mod_base = OTHER; note = 2'-O-methyluridine-3'-phosphate
  modified_base 6: mod_base = OTHER; note = 2'-O-methylguanosine-3'-phosphate
  modified_base 7: mod_base = OTHER; note = 2'-deoxy-2'-fluorouridine-3'-phosphate
  modified_base 8: mod_base = OTHER; note = 2'-O-methyladenosine-3'-phosphate
  modified_base 9: mod_base = OTHER; note = 2'-deoxy-2'-fluorocytidine-3'-phosphate
  modified_base 10: mod_base = OTHER; note = 2'-deoxy-2'-fluoroguanosine-3'-phosphate
  modified_base 11: mod_base = OTHER; note = 2'-deoxy-2'-fluoroguanosine-3'-phosphate
  modified_base 12: mod_base = OTHER; note = 2'-O-methylguanosine-3'-phosphate
  modified_base 13: mod_base = OTHER; note = 2'-O-methyluridine-3'-phosphate
  modified_base 14: mod_base = OTHER; note = 2'-O-methyluridine-3'-phosphate
  modified_base 15: mod_base = OTHER; note = 2'-O-methylcytidine-3'-phosphate
  modified_base 16: mod_base = OTHER; note = 2'-O-methylcytidine-3'-phosphate
  modified_base 17: mod_base = OTHER; note = 2'-O-methyladenosine-3'-phosphate
  modified_base 18: mod_base = OTHER; note = 2'-O-methyluridine-3'-phosphate
  modified_base 19: mod_base = OTHER; note = 2'-O-methyladenosine-3'-phosphate
  modified_base 20: mod_base = OTHER; note = 2'-O-methyluridine-3'-phosphate
  modified_base 21: mod_base = OTHER; note = 2'-O-methyluridine-3'-phosphate ((2S,4R)-1-[29-[[2-(acetylamino)-2-deoxy-beta-D-galactopyra nosyl]oxy]-14,14-bis[[3-[[3-[[5-[[2-(acetylamino)-2-deoxy-b eta-D-galactopyranosyl]oxy]-1-oxopentyl]amino]propyl]amino] -3-oxopropoxy]methyl]-1,12,19,25-tetraoxo-16-oxa-13,20,24-t riazanonacos-1-yl]-4-hydroxy-2-pyrrolidinyl)methyl ester
agactgtacgggttccatatt

SEQ ID NO: 845 - RNA, 21 nt, synthetic construct
  source 1..21: mol_type = other RNA
  modified_base 1: mod_base = OTHER; note = 2'-O-methylguanosine-3'-phosphorothioate
  modified_base 2: mod_base = OTHER; note = 2'-O-methylguanosine-3'-phosphorothioate
  modified_base 3: mod_base = OTHER; note = 2'-O-methylguanosine-3'-phosphate
  modified_base 4: mod_base = OTHER; note = 2'-O-methyluridine-3'-phosphate
  modified_base 5: mod_base = OTHER; note = 2'-O-methyluridine-3'-phosphate
  modified_base 6: mod_base = OTHER; note = 2'-O-methylcytidine-3'-phosphate
  modified_base 7: mod_base = OTHER; note = 2'-deoxy-2'-fluorocytidine-3'-phosphate
  modified_base 8: mod_base = OTHER; note = 2'-O-methyladenosine-3'-phosphate
  modified_base 9: mod_base = OTHER; note = 2'-deoxy-2'-fluorouridine-3'-phosphate
  modified_base 10: mod_base = OTHER; note = 2'-deoxy-2'-fluoroadenosine-3'-phosphate
  modified_base 11: mod_base = OTHER; note = 2'-deoxy-2'-fluorouridine-3'-phosphate
  modified_base 12: mod_base = OTHER; note = 2'-O-methylcytidine-3'-phosphate
  modified_base 13: mod_base = OTHER; note = 2'-O-methylcytidine-3'-phosphate
  modified_base 14: mod_base = OTHER; note = 2'-O-methyladenosine-3'-phosphate
  modified_base 15: mod_base = OTHER; note = 2'-O-methyladenosine-3'-phosphate
  modified_base 16: mod_base = OTHER; note = 2'-O-methyladenosine-3'-phosphate
  modified_base 17: mod_base = OTHER; note = 2'-O-methylguanosine-3'-phosphate
  modified_base 18: mod_base = OTHER; note = 2'-O-methylguanosine-3'-phosphate
  modified_base 19: mod_base = OTHER; note = 2'-O-methylcytidine-3'-phosphate
  modified_base 20: mod_base = OTHER; note = 2'-O-methyladenosine-3'-phosphate
  modified_base 21: mod_base = OTHER; note = 2'-O-methyluridine-3'-phosphate ((2S,4R)-1-[29-[[2-(acetylamino)-2-deoxy-beta-D-galactopyra nosyl]oxy]-14,14-bis[[3-[[3-[[5-[[2-(acetylamino)-2-deoxy-b eta-D-galactopyranosyl]oxy]-1-oxopentyl]amino]propyl]amino] -3-oxopropoxy]methyl]-1,12,19,25-tetraoxo-16-oxa-13,20,24-t riazanonacos-1-yl]-4-hydroxy-2-pyrrolidinyl)methyl ester
gggttccatatccaaaggcat

SEQ ID NO: 846 - RNA, 21 nt, synthetic construct
  source 1..21: mol_type = other RNA
  modified_base 1: mod_base = OTHER; note = 2'-O-methylguanosine-3'-phosphorothioate
  modified_base 2: mod_base = OTHER; note = 2'-O-methylguanosine-3'-phosphorothioate
  modified_base 3: mod_base = OTHER; note = 2'-O-methyladenosine-3'-phosphate
  modified_base 4: mod_base = OTHER; note = 2'-O-methylguanosine-3'-phosphate
  modified_base 5: mod_base = OTHER; note = 2'-O-methylcytidine-3'-phosphate
  modified_base 6: mod_base = OTHER; note = 2'-O-methyluridine-3'-phosphate
  modified_base 7: mod_base = OTHER; note = 2'-deoxy-2'-fluoroguanosine-3'-phosphate
  modified_base 8: mod_base = OTHER; note = 2'-O-methyluridine-3'-phosphate
  modified_base 9: mod_base = OTHER; note = 2'-deoxy-2'-fluoroguanosine-3'-phosphate
  modified_base 10: mod_base = OTHER; note = 2'-deoxy-2'-fluoroadenosine-3'-phosphate
  modified_base 11: mod_base = OTHER; note = 2'-deoxy-2'-fluoroadenosine-3'-phosphate
  modified_base 12: mod_base = OTHER; note = 2'-O-methyluridine-3'-phosphate
  modified_base 13: mod_base = OTHER; note = 2'-O-methylcytidine-3'-phosphate
  modified_base 14: mod_base = OTHER; note = 2'-O-methylcytidine-3'-phosphate
  modified_base 15: mod_base = OTHER; note = 2'-O-methyladenosine-3'-phosphate
  modified_base 16: mod_base = OTHER; note = 2'-O-methyladenosine-3'-phosphate
  modified_base 17: mod_base = OTHER; note = 2'-O-methylcytidine-3'-phosphate
  modified_base 18: mod_base = OTHER; note = 2'-O-methyluridine-3'-phosphate
  modified_base 19: mod_base = OTHER; note = 2'-O-methylguanosine-3'-phosphate
  modified_base 20: mod_base = OTHER; note = 2'-O-methyluridine-3'-phosphate
  modified_base 21: mod_base = OTHER; note = 2'-O-methyluridine-3'-phosphate ((2S,4R)-1-[29-[[2-(acetylamino)-2-deoxy-beta-D-galactopyra nosyl]oxy]-14,14-bis[[3-[[3-[[5-[[2-(acetylamino)-2-deoxy-b eta-D-galactopyranosyl]oxy]-1-oxopentyl]amino]propyl]amino] -3-oxopropoxy]methyl]-1,12,19,25-tetraoxo-16-oxa-13,20,24-t riazanonacos-1-yl]-4-hydroxy-2-pyrrolidinyl)methyl ester
ggagctgtgaatccaactgtt

SEQ ID NO: 847 - RNA, 21 nt, synthetic construct
  source 1..21: mol_type = other RNA
  modified_base 1: mod_base = OTHER; note = 2'-O-methylguanosine-3'-phosphorothioate
  modified_base 2: mod_base = OTHER; note = 2'-O-methyluridine-3'-phosphorothioate
  modified_base 3: mod_base = OTHER; note = 2'-O-methylguanosine-3'-phosphate
  modified_base 4: mod_base = OTHER; note = 2'-O-methyladenosine-3'-phosphate
  modified_base 5: mod_base = OTHER; note = 2'-O-methyladenosine-3'-phosphate
  modified_base 6: mod_base = OTHER; note = 2'-O-methyluridine-3'-phosphate
  modified_base 7: mod_base = OTHER; note = 2'-deoxy-2'-fluorocytidine-3'-phosphate
  modified_base 8: mod_base = OTHER; note = 2'-O-methylcytidine-3'-phosphate
  modified_base 9: mod_base = OTHER; note = 2'-deoxy-2'-fluoroadenosine-3'-phosphate
  modified_base 10: mod_base = OTHER; note = 2'-deoxy-2'-fluoroadenosine-3'-phosphate
  modified_base 11: mod_base = OTHER; note = 2'-deoxy-2'-fluorocytidine-3'-phosphate
  modified_base 12: mod_base = OTHER; note = 2'-O-methyluridine-3'-phosphate
  modified_base 13: mod_base = OTHER; note = 2'-O-methylguanosine-3'-phosphate
  modified_base 14: mod_base = OTHER; note = 2'-O-methyluridine-3'-phosphate
  modified_base 15: mod_base = OTHER; note = 2'-O-methyladenosine-3'-phosphate
  modified_base 16: mod_base = OTHER; note = 2'-O-methyladenosine-3'-phosphate
  modified_base 17: mod_base = OTHER; note = 2'-O-methyladenosine-3'-phosphate
  modified_base 18: mod_base = OTHER; note = 2'-O-methylguanosine-3'-phosphate
  modified_base 19: mod_base = OTHER; note = 2'-O-methyluridine-3'-phosphate
  modified_base 20: mod_base = OTHER; note = 2'-O-methyluridine-3'-phosphate
  modified_base 21: mod_base = OTHER; note = 2'-O-methyluridine-3'-phosphate ((2S,4R)-1-[29-[[2-(acetylamino)-2-deoxy-beta-D-galactopyra nosyl]oxy]-14,14-bis[[3-[[3-[[5-[[2-(acetylamino)-2-deoxy-b eta-D-galactopyranosyl]oxy]-1-oxopentyl]amino]propyl]amino] -3-oxopropoxy]methyl]-1,12,19,25-tetraoxo-16-oxa-13,20,24-t riazanonacos-1-yl]-4-hydroxy-2-pyrrolidinyl)methyl ester
gtgaatccaactgtaaagttt

SEQ ID NO: 848 - RNA, 21 nt, synthetic construct
  source 1..21: mol_type = other RNA
  modified_base 1: mod_base = OTHER; note = 2'-O-methylcytidine-3'-phosphorothioate
  modified_base 2: mod_base = OTHER; note = 2'-O-methyladenosine-3'-phosphorothioate
  modified_base 3: mod_base = OTHER; note = 2'-O-methyladenosine-3'-phosphate
  modified_base 4: mod_base = OTHER; note = 2'-O-methylcytidine-3'-phosphate
  modified_base 5: mod_base = OTHER; note = 2'-O-methyluridine-3'-phosphate
  modified_base 6: mod_base = OTHER; note = 2'-O-methylguanosine-3'-phosphate
  modified_base 7: mod_base = OTHER; note = 2'-deoxy-2'-fluorouridine-3'-phosphate
  modified_base 8: mod_base = OTHER; note = 2'-O-methyladenosine-3'-phosphate
  modified_base 9: mod_base = OTHER; note = 2'-deoxy-2'-fluoroadenosine-3'-phosphate
  modified_base 10: mod_base = OTHER; note = 2'-deoxy-2'-fluoroadenosine-3'-phosphate
  modified_base 11: mod_base = OTHER; note = 2'-deoxy-2'-fluoroguanosine-3'-phosphate
  modified_base 12: mod_base = OTHER; note = 2'-O-methyluridine-3'-phosphate
  modified_base 13: mod_base = OTHER; note = 2'-O-methyluridine-3'-phosphate
  modified_base 14: mod_base = OTHER; note = 2'-O-methylcytidine-3'-phosphate
  modified_base 15: mod_base = OTHER; note = 2'-O-methyluridine-3'-phosphate
  modified_base 16: mod_base = OTHER; note = 2'-O-methyluridine-3'-phosphate
  modified_base 17: mod_base = OTHER; note = 2'-O-methyluridine-3'-phosphate
  modified_base 18: mod_base = OTHER; note = 2'-O-methylguanosine-3'-phosphate
  modified_base 19: mod_base = OTHER; note = 2'-O-methyluridine-3'-phosphate
  modified_base 20: mod_base = OTHER; note = 2'-O-methyluridine-3'-phosphate
  modified_base 21: mod_base = OTHER; note = 2'-O-methyluridine-3'-phosphate ((2S,4R)-1-[29-[[2-(acetylamino)-2-deoxy-beta-D-galactopyra nosyl]oxy]-14,14-bis[[3-[[3-[[5-[[2-(acetylamino)-2-deoxy-b eta-D-galactopyranosyl]oxy]-1-oxopentyl]amino]propyl]amino] -3-oxopropoxy]methyl]-1,12,19,25-tetraoxo-16-oxa-13,20,24-t riazanonacos-1-yl]-4-hydroxy-2-pyrrolidinyl)methyl ester
caactgtaaagttctttgttt

SEQ ID NO: 849 - RNA, 21 nt, synthetic construct
  source 1..21: mol_type = other RNA
  modified_base 1: mod_base = OTHER; note = 2'-O-methyluridine-3'-phosphorothioate
  modified_base 2: mod_base = OTHER; note = 2'-O-methyluridine-3'-phosphorothioate
  modified_base 3: mod_base = OTHER; note = 2'-O-methylcytidine-3'-phosphate
  modified_base 4: mod_base = OTHER; note = 2'-O-methyluridine-3'-phosphate
  modified_base 5: mod_base = OTHER; note = 2'-O-methyluridine-3'-phosphate
  modified_base 6: mod_base = OTHER; note = 2'-O-methyluridine-3'-phosphate
  modified_base 7: mod_base = OTHER; note = 2'-deoxy-2'-fluoroguanosine-3'-phosphate
  modified_base 8: mod_base = OTHER; note = 2'-O-methyluridine-3'-phosphate
  modified_base 9: mod_base = OTHER; note = 2'-deoxy-2'-fluorouridine-3'-phosphate
  modified_base 10: mod_base = OTHER; note = 2'-deoxy-2'-fluoroguanosine-3'-phosphate
  modified_base 11: mod_base = OTHER; note = 2'-deoxy-2'-fluorouridine-3'-phosphate
  modified_base 12: mod_base = OTHER; note = 2'-O-methyladenosine-3'-phosphate
  modified_base 13: mod_base = OTHER; note = 2'-O-methyladenosine-3'-phosphate
  modified_base 14: mod_base = OTHER; note = 2'-O-methyladenosine-3'-phosphate
  modified_base 15: mod_base = OTHER; note = 2'-O-methyluridine-3'-phosphate
  modified_base 16: mod_base = OTHER; note = 2'-O-methyladenosine-3'-phosphate
  modified_base 17: mod_base = OTHER; note = 2'-O-methylcytidine-3'-phosphate
  modified_base 18: mod_base = OTHER; note = 2'-O-methyladenosine-3'-phosphate
  modified_base 19: mod_base = OTHER; note = 2'-O-methylguanosine-3'-phosphate
  modified_base 20: mod_base = OTHER; note = 2'-O-methyladenosine-3'-phosphate
  modified_base 21: mod_base = OTHER; note = 2'-O-methyluridine-3'-phosphate ((2S,4R)-1-[29-[[2-(acetylamino)-2-deoxy-beta-D-galactopyra nosyl]oxy]-14,14-bis[[3-[[3-[[5-[[2-(acetylamino)-2-deoxy-b eta-D-galactopyranosyl]oxy]-1-oxopentyl]amino]propyl]amino] -3-oxopropoxy]methyl]-1,12,19,25-tetraoxo-16-oxa-13,20,24-t riazanonacos-1-yl]-4-hydroxy-2-pyrrolidinyl)methyl ester
ttctttgttgtaaatacagat

SEQ ID NO: 850 - RNA, 21 nt, synthetic construct
  source 1..21: mol_type = other RNA
  modified_base 1: mod_base = OTHER; note = 2'-O-methylguanosine-3'-phosphorothioate
  modified_base 2: mod_base = OTHER; note = 2'-O-methyluridine-3'-phosphorothioate
  modified_base 3: mod_base = OTHER; note = 2'-O-methyluridine-3'-phosphate
  modified_base 4: mod_base = OTHER; note = 2'-O-methylguanosine-3'-phosphate
  modified_base 5: mod_base = OTHER; note = 2'-O-methyluridine-3'-phosphate
  modified_base 6: mod_base = OTHER; note = 2'-O-methyladenosine-3'-phosphate
  modified_base 7: mod_base = OTHER; note = 2'-deoxy-2'-fluoroadenosine-3'-phosphate
  modified_base 8: mod_base = OTHER; note = 2'-O-methyladenosine-3'-phosphate
  modified_base 9: mod_base = OTHER; note = 2'-deoxy-2'-fluorouridine-3'-phosphate
  modified_base 10: mod_base = OTHER; note = 2'-deoxy-2'-fluoroadenosine-3'-phosphate
  modified_base 11: mod_base = OTHER; note = 2'-deoxy-2'-fluorocytidine-3'-phosphate
  modified_base 12: mod_base = OTHER; note = 2'-O-methyladenosine-3'-phosphate
  modified_base 13: mod_base = OTHER; note = 2'-O-methylguanosine-3'-phosphate
  modified_base 14: mod_base = OTHER; note = 2'-O-methyladenosine-3'-phosphate
  modified_base 15: mod_base = OTHER; note = 2'-O-methylcytidine-3'-phosphate
  modified_base 16: mod_base = OTHER; note = 2'-O-methyluridine-3'-phosphate
  modified_base 17: mod_base = OTHER; note = 2'-O-methylcytidine-3'-phosphate
  modified_base 18: mod_base = OTHER; note = 2'-O-methyluridine-3'-phosphate
  modified_base 19: mod_base = OTHER; note = 2'-O-methylcytidine-3'-phosphate
  modified_base 20: mod_base = OTHER; note = 2'-O-methyluridine-3'-phosphate
  modified_base 21: mod_base = OTHER; note = 2'-O-methyluridine-3'-phosphate ((2S,4R)-1-[29-[[2-(acetylamino)-2-deoxy-beta-D-galactopyra nosyl]oxy]-14,14-bis[[3-[[3-[[5-[[2-(acetylamino)-2-deoxy-b eta-D-galactopyranosyl]oxy]-1-oxopentyl]amino]propyl]amino] -3-oxopropoxy]methyl]-1,12,19,25-tetraoxo-16-oxa-13,20,24-t riazanonacos-1-yl]-4-hydroxy-2-pyrrolidinyl)methyl ester
gttgtaaatacagactctctt

SEQ ID NO: 851 - RNA, 21 nt, synthetic construct
  source 1..21: mol_type = other RNA
  modified_base 1: mod_base = OTHER; note = 2'-O-methyladenosine-3'-phosphorothioate
  modified_base 2: mod_base = OTHER; note = 2'-O-methylguanosine-3'-phosphorothioate
  modified_base 3: mod_base = OTHER; note = 2'-O-methyladenosine-3'-phosphate
  modified_base 4: mod_base = OTHER; note = 2'-O-methylcytidine-3'-phosphate
  modified_base 5: mod_base = OTHER; note = 2'-O-methyluridine-3'-phosphate
  modified_base 6: mod_base = OTHER; note = 2'-O-methylcytidine-3'-phosphate
  modified_base 7: mod_base = OTHER; note = 2'-deoxy-2'-fluorouridine-3'-phosphate
  modified_base 8: mod_base = OTHER; note = 2'-O-methylcytidine-3'-phosphate
  modified_base 9: mod_base = OTHER; note = 2'-deoxy-2'-fluorouridine-3'-phosphate
  modified_base 10: mod_base = OTHER; note = 2'-deoxy-2'-fluorocytidine-3'-phosphate
  modified_base 11: mod_base = OTHER; note = 2'-deoxy-2'-fluoroadenosine-3'-phosphate
  modified_base 12: mod_base = OTHER; note = 2'-O-methylguanosine-3'-phosphate
  modified_base 13: mod_base = OTHER; note = 2'-O-methylcytidine-3'-phosphate
  modified_base 14: mod_base = OTHER; note = 2'-O-methyluridine-3'-phosphate
  modified_base 15: mod_base = OTHER; note = 2'-O-methylcytidine-3'-phosphate
  modified_base 16: mod_base = OTHER; note = 2'-O-methyladenosine-3'-phosphate
  modified_base 17: mod_base = OTHER; note = 2'-O-methylguanosine-3'-phosphate
  modified_base 18: mod_base = OTHER; note = 2'-O-methyluridine-3'-phosphate
  modified_base 19: mod_base = OTHER; note = 2'-O-methylcytidine-3'-phosphate
  modified_base 20: mod_base = OTHER; note = 2'-O-methyladenosine-3'-phosphate
  modified_base 21: mod_base = OTHER; note = 2'-O-methyluridine-3'-phosphate ((2S,4R)-1-[29-[[2-(acetylamino)-2-deoxy-beta-D-galactopyra nosyl]oxy]-14,14-bis[[3-[[3-[[5-[[2-(acetylamino)-2-deoxy-b eta-D-galactopyranosyl]oxy]-1-oxopentyl]amino]propyl]amino] -3-oxopropoxy]methyl]-1,12,19,25-tetraoxo-16-oxa-13,20,24-t riazanonacos-1-yl]-4-hydroxy-2-pyrrolidinyl)methyl ester
agactctctcagctcagtcat

SEQ ID NO: 852 - RNA, 21 nt, synthetic construct
  source 1..21: mol_type = other RNA
  modified_base 1: mod_base = OTHER; note = 2'-O-methyluridine-3'-phosphorothioate
  modified_base 2: mod_base = OTHER; note = 2'-O-methylcytidine-3'-phosphorothioate
  modified_base 3: mod_base = OTHER; note = 2'-O-methyluridine-3'-phosphate
  modified_base 4: mod_base = OTHER; note = 2'-O-methylcytidine-3'-phosphate
  modified_base 5: mod_base = OTHER; note = 2'-O-methyladenosine-3'-phosphate
  modified_base 6: mod_base = OTHER; note = 2'-O-methylguanosine-3'-phosphate
  modified_base 7: mod_base = OTHER; note = 2'-deoxy-2'-fluorocytidine-3'-phosphate
  modified_base 8: mod_base = OTHER; note = 2'-O-methyluridine-3'-phosphate
  modified_base 9: mod_base = OTHER; note = 2'-deoxy-2'-fluorocytidine-3'-phosphate
  modified_base 10: mod_base = OTHER; note = 2'-deoxy-2'-fluoroadenosine-3'-phosphate
  modified_base 11: mod_base = OTHER; note = 2'-deoxy-2'-fluoroguanosine-3'-phosphate
  modified_base 12: mod_base = OTHER; note = 2'-O-methyluridine-3'-phosphate
  modified_base 13: mod_base = OTHER; note = 2'-O-methylcytidine-3'-phosphate
  modified_base 14: mod_base = OTHER; note = 2'-O-methyladenosine-3'-phosphate
  modified_base 15: mod_base = OTHER; note = 2'-O-methylcytidine-3'-phosphate
  modified_base 16: mod_base = OTHER; note = 2'-O-methylcytidine-3'-phosphate
  modified_base 17: mod_base = OTHER; note = 2'-O-methyladenosine-3'-phosphate
  modified_base 18: mod_base = OTHER; note = 2'-O-methyladenosine-3'-phosphate
  modified_base 19: mod_base = OTHER; note = 2'-O-methyluridine-3'-phosphate
  modified_base 20: mod_base = OTHER; note = 2'-O-methylguanosine-3'-phosphate
  modified_base 21: mod_base = OTHER; note = 2'-O-methyluridine-3'-phosphate ((2S,4R)-1-[29-[[2-(acetylamino)-2-deoxy-beta-D-galactopyra nosyl]oxy]-14,14-bis[[3-[[3-[[5-[[2-(acetylamino)-2-deoxy-b eta-D-galactopyranosyl]oxy]-1-oxopentyl]amino]propyl]amino] -3-oxopropoxy]methyl]-1,12,19,25-tetraoxo-16-oxa-13,20,24-t riazanonacos-1-yl]-4-hydroxy-2-pyrrolidinyl)methyl ester
tctcagctcagtcaccaatgt

SEQ ID NO: 853 - RNA, 21 nt, synthetic construct
  source 1..21: mol_type = other RNA
  modified_base 1: mod_base = OTHER; note = 2'-O-methyluridine-3'-phosphorothioate
  modified_base 2: mod_base = OTHER; note = 2'-O-methylcytidine-3'-phosphorothioate
  modified_base 3: mod_base = OTHER; note = 2'-O-methyladenosine-3'-phosphate
  modified_base 4: mod_base = OTHER; note = 2'-O-methylguanosine-3'-phosphate
  modified_base 5: mod_base = OTHER; note = 2'-O-methyluridine-3'-phosphate
  modified_base 6: mod_base = OTHER; note = 2'-O-methylcytidine-3'-phosphate
  modified_base 7: mod_base = OTHER; note = 2'-deoxy-2'-fluoroadenosine-3'-phosphate
  modified_base 8: mod_base = OTHER; note = 2'-O-methylcytidine-3'-phosphate
  modified_base 9: mod_base = OTHER; note = 2'-deoxy-2'-fluorocytidine-3'-phosphate
  modified_base 10: mod_base = OTHER; note = 2'-deoxy-2'-fluoroadenosine-3'-phosphate
  modified_base 11: mod_base = OTHER; note = 2'-deoxy-2'-fluoroadenosine-3'-phosphate
  modified_base 12: mod_base = OTHER; note = 2'-O-methyluridine-3'-phosphate
  modified_base 13: mod_base = OTHER; note = 2'-O-methylguanosine-3'-phosphate
  modified_base 14: mod_base = OTHER; note = 2'-O-methylcytidine-3'-phosphate
  modified_base 15: mod_base = OTHER; note = 2'-O-methyladenosine-3'-phosphate
  modified_base 16: mod_base = OTHER; note = 2'-O-methyladenosine-3'-phosphate
  modified_base 17: mod_base = OTHER; note = 2'-O-methylcytidine-3'-phosphate
  modified_base 18: mod_base = OTHER; note = 2'-O-methyluridine-3'-phosphate
  modified_base 19: mod_base = OTHER; note = 2'-O-methyluridine-3'-phosphate
  modified_base 20: mod_base = OTHER; note = 2'-O-methylcytidine-3'-phosphate
  modified_base 21: mod_base = OTHER; note = 2'-O-methyluridine-3'-phosphate ((2S,4R)-1-[29-[[2-(acetylamino)-2-deoxy-beta-D-galactopyra nosyl]oxy]-14,14-bis[[3-[[3-[[5-[[2-(acetylamino)-2-deoxy-b eta-D-galactopyranosyl]oxy]-1-oxopentyl]amino]propyl]amino] -3-oxopropoxy]methyl]-1,12,19,25-tetraoxo-16-oxa-13,20,24-t riazanonacos-1-yl]-4-hydroxy-2-pyrrolidinyl)methyl ester
tcagtcaccaatgcaacttct

SEQ ID NO: 854 - RNA, 21 nt, synthetic construct
  source 1..21: mol_type = other RNA
  modified_base 1: mod_base = OTHER; note = 2'-O-methylcytidine-3'-phosphorothioate
  modified_base 2: mod_base = OTHER; note = 2'-O-methylcytidine-3'-phosphorothioate
  modified_base 3: mod_base = OTHER; note = 2'-O-methyladenosine-3'-phosphate
  modified_base 4: mod_base = OTHER; note = 2'-O-methyladenosine-3'-phosphate
  modified_base 5: mod_base = OTHER; note = 2'-O-methyluridine-3'-phosphate
  modified_base 6: mod_base = OTHER; note = 2'-O-methylguanosine-3'-phosphate
  modified_base 7: mod_base = OTHER; note = 2'-deoxy-2'-fluorocytidine-3'-phosphate
  modified_base 8: mod_base = OTHER; note = 2'-O-methyladenosine-3'-phosphate
  modified_base 9: mod_base = OTHER; note = 2'-deoxy-2'-fluoroadenosine-3'-phosphate
  modified_base 10: mod_base = OTHER; note = 2'-deoxy-2'-fluorocytidine-3'-phosphate
  modified_base 11: mod_base = OTHER; note = 2'-deoxy-2'-fluorouridine-3'-phosphate
  modified_base 12: mod_base = OTHER; note = 2'-O-methyluridine-3'-phosphate
  modified_base 13: mod_base = OTHER; note = 2'-O-methylcytidine-3'-phosphate
  modified_base 14: mod_base = OTHER; note = 2'-O-methylcytidine-3'-phosphate
  modified_base 15: mod_base = OTHER; note = 2'-O-methyladenosine-3'-phosphate
  modified_base 16: mod_base = OTHER; note = 2'-O-methyluridine-3'-phosphate
  modified_base 17: mod_base = OTHER; note = 2'-O-methyladenosine-3'-phosphate
  modified_base 18: mod_base = OTHER; note = 2'-O-methylcytidine-3'-phosphate
  modified_base 19: mod_base = OTHER; note = 2'-O-methyladenosine-3'-phosphate
  modified_base 20: mod_base = OTHER; note = 2'-O-methyladenosine-3'-phosphate
  modified_base 21: mod_base = OTHER; note = 2'-O-methyluridine-3'-phosphate ((2S,4R)-1-[29-[[2-(acetylamino)-2-deoxy-beta-D-galactopyra nosyl]oxy]-14,14-bis[[3-[[3-[[5-[[2-(acetylamino)-2-deoxy-b eta-D-galactopyranosyl]oxy]-1-oxopentyl]amino]propyl]amino] -3-oxopropoxy]methyl]-1,12,19,25-tetraoxo-16-oxa-13,20,24-t riazanonacos-1-yl]-4-hydroxy-2-pyrrolidinyl)methyl ester
ccaatgcaacttccatacaat

SEQ ID NO: 855 - RNA, 21 nt, synthetic construct
  source 1..21: mol_type = other RNA
  modified_base 1: mod_base = OTHER; note = 2'-O-methylcytidine-3'-phosphorothioate
  modified_base 2: mod_base = OTHER; note = 2'-O-methyladenosine-3'-phosphorothioate
  modified_base 3: mod_base = OTHER; note = 2'-O-methyladenosine-3'-phosphate
  modified_base 4: mod_base = OTHER; note = 2'-O-methylcytidine-3'-phosphate
  modified_base 5: mod_base = OTHER; note = 2'-O-methyluridine-3'-phosphate
  modified_base 6: mod_base = OTHER; note = 2'-O-methyluridine-3'-phosphate
  modified_base 7: mod_base = OTHER; note = 2'-deoxy-2'-fluorocytidine-3'-phosphate
  modified_base 8: mod_base = OTHER; note = 2'-O-methylcytidine-3'-phosphate
  modified_base 9: mod_base = OTHER; note = 2'-deoxy-2'-fluoroadenosine-3'-phosphate
  modified_base 10: mod_base = OTHER; note = 2'-deoxy-2'-fluorouridine-3'-phosphate
  modified_base 11: mod_base = OTHER; note = 2'-deoxy-2'-fluoroadenosine-3'-phosphate
  modified_base 12: mod_base = OTHER; note = 2'-O-methylcytidine-3'-phosphate
  modified_base 13: mod_base = OTHER; note = 2'-O-methyladenosine-3'-phosphate
  modified_base 14: mod_base = OTHER; note = 2'-O-methyladenosine-3'-phosphate
  modified_base 15: mod_base = OTHER; note = 2'-O-methyladenosine-3'-phosphate
  modified_base 16: mod_base = OTHER; note = 2'-O-methyluridine-3'-phosphate
  modified_base 17: mod_base = OTHER; note = 2'-O-methylcytidine-3'-phosphate
  modified_base 18: mod_base = OTHER; note = 2'-O-methyladenosine-3'-phosphate
  modified_base 19: mod_base = OTHER; note = 2'-O-methylcytidine-3'-phosphate
  modified_base 20: mod_base = OTHER; note = 2'-O-methyluridine-3'-phosphate
  modified_base 21: mod_base = OTHER; note = 2'-O-methyluridine-3'-phosphate ((2S,4R)-1-[29-[[2-(acetylamino)-2-deoxy-beta-D-galactopyra nosyl]oxy]-14,14-bis[[3-[[3-[[5-[[2-(acetylamino)-2-deoxy-b eta-D-galactopyranosyl]oxy]-1-oxopentyl]amino]propyl]amino] -3-oxopropoxy]methyl]-1,12,19,25-tetraoxo-16-oxa-13,20,24-t riazanonacos-1-yl]-4-hydroxy-2-pyrrolidinyl)methyl ester
caacttccatacaaatcactt

SEQ ID NO: 856 - RNA, 21 nt, synthetic construct
  source 1..21: mol_type = other RNA
  modified_base 1: mod_base = OTHER; note = 2'-O-methylcytidine-3'-phosphorothioate
  modified_base 2: mod_base = OTHER; note = 2'-O-methylcytidine-3'-phosphorothioate
  modified_base 3: mod_base = OTHER; note = 2'-O-methyladenosine-3'-phosphate
  modified_base 4: mod_base = OTHER; note = 2'-O-methyluridine-3'-phosphate
  modified_base 5: mod_base = OTHER; note = 2'-O-methyladenosine-3'-phosphate
  modified_base 6: mod_base = OTHER; note = 2'-O-methylcytidine-3'-phosphate
  modified_base 7: mod_base = OTHER; note = 2'-deoxy-2'-fluoroadenosine-3'-phosphate
  modified_base 8: mod_base = OTHER; note = 2'-O-methyladenosine-3'-phosphate
  modified_base 9: mod_base = OTHER; note = 2'-deoxy-2'-fluoroadenosine-3'-phosphate
  modified_base 10: mod_base = OTHER; note = 2'-deoxy-2'-fluorouridine-3'-phosphate
  modified_base 11: mod_base = OTHER; note = 2'-deoxy-2'-fluorocytidine-3'-phosphate
  modified_base 12: mod_base = OTHER; note = 2'-O-methyladenosine-3'-phosphate
  modified_base 13: mod_base = OTHER; note = 2'-O-methylcytidine-3'-phosphate
  modified_base 14: mod_base = OTHER; note = 2'-O-methyluridine-3'-phosphate
  modified_base 15: mod_base = OTHER; note = 2'-O-methylguanosine-3'-phosphate
  modified_base 16: mod_base = OTHER; note = 2'-O-methylcytidine-3'-phosphate
  modified_base 17: mod_base = OTHER; note = 2'-O-methyluridine-3'-phosphate
  modified_base 18: mod_base = OTHER; note = 2'-O-methylcytidine-3'-phosphate
  modified_base 19: mod_base = OTHER; note = 2'-O-methylcytidine-3'-phosphate
  modified_base 20: mod_base = OTHER; note = 2'-O-methyluridine-3'-phosphate
  modified_base 21: mod_base = OTHER; note = 2'-O-methyluridine-3'-phosphate ((2S,4R)-1-[29-[[2-(acetylamino)-2-deoxy-beta-D-galactopyra nosyl]oxy]-14,14-bis[[3-[[3-[[5-[[2-(acetylamino)-2-deoxy-b eta-D-galactopyranosyl]oxy]-1-oxopentyl]amino]propyl]amino] -3-oxopropoxy]methyl]-1,12,19,25-tetraoxo-16-oxa-13,20,24-t riazanonacos-1-yl]-4-hydroxy-2-pyrrolidinyl)methyl ester
ccatacaaatcactgctcctt

SEQ ID NO: 857 - RNA, 21 nt, synthetic construct
  source 1..21: mol_type = other RNA
  modified_base 1: mod_base = OTHER; note = 2'-O-methyladenosine-3'-phosphorothioate
  modified_base 2: mod_base = OTHER; note = 2'-O-methyluridine-3'-phosphorothioate
  modified_base 3: mod_base = OTHER; note = 2'-O-methylcytidine-3'-phosphate
  modified_base 4: mod_base = OTHER; note = 2'-O-methyladenosine-3'-phosphate
  modified_base 5: mod_base = OTHER; note = 2'-O-methylcytidine-3'-phosphate
  modified_base 6: mod_base = OTHER; note = 2'-O-methyluridine-3'-phosphate
  modified_base 7: mod_base = OTHER; note = 2'-deoxy-2'-fluoroguanosine-3'-phosphate
  modified_base 8: mod_base = OTHER; note = 2'-O-methylcytidine-3'-phosphate
  modified_base 9: mod_base = OTHER; note = 2'-deoxy-2'-fluorouridine-3'-phosphate
  modified_base 10: mod_base = OTHER; note = 2'-deoxy-2'-fluorocytidine-3'-phosphate
  modified_base 11: mod_base = OTHER; note = 2'-deoxy-2'-fluorocytidine-3'-phosphate
  modified_base 12: mod_base = OTHER; note = 2'-O-methyluridine-3'-phosphate
  modified_base 13: mod_base = OTHER; note = 2'-O-methylguanosine-3'-phosphate
  modified_base 14: mod_base = OTHER; note = 2'-O-methylcytidine-3'-phosphate
  modified_base 15: mod_base = OTHER; note = 2'-O-methyluridine-3'-phosphate
  modified_base 16: mod_base = OTHER; note = 2'-O-methyluridine-3'-phosphate
  modified_base 17: mod_base = OTHER; note = 2'-O-methylcytidine-3'-phosphate
  modified_base 18: mod_base = OTHER; note = 2'-O-methyluridine-3'-phosphate
  modified_base 19: mod_base = OTHER; note = 2'-O-methyladenosine-3'-phosphate
  modified_base 20: mod_base = OTHER; note = 2'-O-methyluridine-3'-phosphate
  modified_base 21: mod_base = OTHER; note = 2'-O-methyluridine-3'-phosphate ((2S,4R)-1-[29-[[2-(acetylamino)-2-deoxy-beta-D-galactopyra nosyl]oxy]-14,14-bis[[3-[[3-[[5-[[2-(acetylamino)-2-deoxy-b eta-D-galactopyranosyl]oxy]-1-oxopentyl]amino]propyl]amino] -3-oxopropoxy]methyl]-1,12,19,25-tetraoxo-16-oxa-13,20,24-t riazanonacos-1-yl]-4-hydroxy-2-pyrrolidinyl)methyl ester
atcactgctcctgcttctatt

SEQ ID NO: 858 - RNA, 21 nt, synthetic construct
  source 1..21: mol_type = other RNA
  modified_base 1: mod_base = OTHER; note = 2'-O-methyluridine-3'-phosphorothioate
  modified_base 2: mod_base = OTHER; note = 2'-O-methylcytidine-3'-phosphorothioate
  modified_base 3: mod_base = OTHER; note = 2'-O-methylcytidine-3'-phosphate
  modified_base 4: mod_base = OTHER; note = 2'-O-methyluridine-3'-phosphate
  modified_base 5: mod_base = OTHER; note = 2'-O-methylguanosine-3'-phosphate
  modified_base 6: mod_base = OTHER; note = 2'-O-methylcytidine-3'-phosphate
  modified_base 7: mod_base = OTHER; note = 2'-deoxy-2'-fluorouridine-3'-phosphate
  modified_base 8: mod_base = OTHER; note = 2'-O-methyluridine-3'-phosphate
  modified_base 9: mod_base = OTHER; note = 2'-deoxy-2'-fluorocytidine-3'-phosphate
  modified_base 10: mod_base = OTHER; note = 2'-deoxy-2'-fluorouridine-3'-phosphate
  modified_base 11: mod_base = OTHER; note = 2'-deoxy-2'-fluoroadenosine-3'-phosphate
  modified_base 12: mod_base = OTHER; note = 2'-O-methyluridine-3'-phosphate
  modified_base 13: mod_base = OTHER; note = 2'-O-methylguanosine-3'-phosphate
  modified_base 14: mod_base = OTHER; note = 2'-O-methyluridine-3'-phosphate
  modified_base 15: mod_base = OTHER; note = 2'-O-methyluridine-3'-phosphate
  modified_base 16: mod_base = OTHER; note = 2'-O-methylguanosine-3'-phosphate
  modified_base 17: mod_base = OTHER; note = 2'-O-methyladenosine-3'-phosphate
  modified_base 18: mod_base = OTHER; note = 2'-O-methyluridine-3'-phosphate
  modified_base 19: mod_base = OTHER; note = 2'-O-methyladenosine-3'-phosphate
  modified_base 20: mod_base = OTHER; note = 2'-O-methylguanosine-3'-phosphate
  modified_base 21: mod_base = OTHER; note = 2'-O-methyluridine-3'-phosphate ((2S,4R)-1-[29-[[2-(acetylamino)-2-deoxy-beta-D-galactopyra nosyl]oxy]-14,14-bis[[3-[[3-[[5-[[2-(acetylamino)-2-deoxy-b eta-D-galactopyranosyl]oxy]-1-oxopentyl]amino]propyl]amino] -3-oxopropoxy]methyl]-1,12,19,25-tetraoxo-16-oxa-13,20,24-t riazanonacos-1-yl]-4-hydroxy-2-pyrrolidinyl)methyl ester
tcctgcttctatgttgatagt

SEQ ID NO: 859 - RNA, 21 nt, synthetic construct
  source 1..21: mol_type = other RNA
  modified_base 1: mod_base = OTHER; note = 2'-O-methylguanosine-3'-phosphorothioate
  modified_base 2: mod_base = OTHER; note = 2'-O-methyladenosine-3'-phosphorothioate
  modified_base 3: mod_base = OTHER; note = 2'-O-methyluridine-3'-phosphate
  modified_base 4: mod_base = OTHER; note = 2'-O-methylcytidine-3'-phosphate
  modified_base 5: mod_base = OTHER; note = 2'-O-methyladenosine-3'-phosphate
  modified_base 6: mod_base = OTHER; note = 2'-O-methylcytidine-3'-phosphate
  modified_base 7: mod_base = OTHER; note = 2'-deoxy-2'-fluorouridine-3'-phosphate
  modified_base 8: mod_base = OTHER; note = 2'-O-methyladenosine-3'-phosphate
  modified_base 9: mod_base = OTHER; note = 2'-deoxy-2'-fluorocytidine-3'-phosphate
  modified_base 10: mod_base = OTHER; note = 2'-deoxy-2'-fluorouridine-3'-phosphate
  modified_base 11: mod_base = OTHER; note = 2'-deoxy-2'-fluorouridine-3'-phosphate
  modified_base 12: mod_base = OTHER; note = 2'-O-methylguanosine-3'-phosphate
  modified_base 13: mod_base = OTHER; note = 2'-O-methyluridine-3'-phosphate
  modified_base 14: mod_base = OTHER; note = 2'-O-methylguanosine-3'-phosphate
  modified_base 15: mod_base = OTHER; note = 2'-O-methyluridine-3'-phosphate
  modified_base 16: mod_base = OTHER; note = 2'-O-methylguanosine-3'-phosphate
  modified_base 17: mod_base = OTHER; note = 2'-O-methyladenosine-3'-phosphate
  modified_base 18: mod_base = OTHER; note = 2'-O-methyluridine-3'-phosphate
  modified_base 19: mod_base = OTHER; note = 2'-O-methylguanosine-3'-phosphate
  modified_base 20: mod_base = OTHER; note = 2'-O-methyluridine-3'-phosphate
  modified_base 21: mod_base = OTHER; note = 2'-O-methyluridine-3'-phosphate ((2S,4R)-1-[29-[[2-(acetylamino)-2-deoxy-beta-D-galactopyra nosyl]oxy]-14,14-bis[[3-[[3-[[5-[[2-(acetylamino)-2-deoxy-b eta-D-galactopyranosyl]oxy]-1-oxopentyl]amino]propyl]amino] -3-oxopropoxy]methyl]-1,12,19,25-tetraoxo-16-oxa-13,20,24-t riazanonacos-1-yl]-4-hydroxy-2-pyrrolidinyl)methyl ester
gatcactacttgtgtgatgtt

SEQ ID NO: 860 - RNA, 21 nt, synthetic construct
  source 1..21: mol_type = other RNA
  modified_base 1: mod_base = OTHER; note = 2'-O-methyluridine-3'-phosphorothioate
  modified_base 2: mod_base = OTHER; note = 2'-O-methyladenosine-3'-phosphorothioate
  modified_base 3: mod_base = OTHER; note = 2'-O-methylcytidine-3'-phosphate
  modified_base 4: mod_base = OTHER; note = 2'-O-methyluridine-3'-phosphate
  modified_base 5: mod_base = OTHER; note = 2'-O-methyluridine-3'-phosphate
  modified_base 6: mod_base = OTHER; note = 2'-O-methylguanosine-3'-phosphate
  modified_base 7: mod_base = OTHER; note = 2'-deoxy-2'-fluorouridine-3'-phosphate
  modified_base 8: mod_base = OTHER; note = 2'-O-methylguanosine-3'-phosphate
  modified_base 9: mod_base = OTHER; note = 2'-deoxy-2'-fluorouridine-3'-phosphate
  modified_base 10: mod_base = OTHER; note = 2'-deoxy-2'-fluoroguanosine-3'-phosphate
  modified_base 11: mod_base = OTHER; note = 2'-deoxy-2'-fluoroadenosine-3'-phosphate
  modified_base 12: mod_base = OTHER; note = 2'-O-methyluridine-3'-phosphate
  modified_base 13: mod_base = OTHER; note = 2'-O-methylguanosine-3'-phosphate
  modified_base 14: mod_base = OTHER; note = 2'-O-methyluridine-3'-phosphate
  modified_base 15: mod_base = OTHER; note = 2'-O-methylguanosine-3'-phosphate
  modified_base 16: mod_base = OTHER; note = 2'-O-methyladenosine-3'-phosphate
  modified_base 17: mod_base = OTHER; note = 2'-O-methylcytidine-3'-phosphate
  modified_base 18: mod_base = OTHER; note = 2'-O-methyladenosine-3'-phosphate
  modified_base 19: mod_base = OTHER; note = 2'-O-methyluridine-3'-phosphate
  modified_base 20: mod_base = OTHER; note = 2'-O-methylguanosine-3'-phosphate
  modified_base 21: mod_base = OTHER; note = 2'-O-methyluridine-3'-phosphate ((2S,4R)-1-[29-[[2-(acetylamino)-2-deoxy-beta-D-galactopyra nosyl]oxy]-14,14-bis[[3-[[3-[[5-[[2-(acetylamino)-2-deoxy-b eta-D-galactopyranosyl]oxy]-1-oxopentyl]amino]propyl]amino] -3-oxopropoxy]methyl]-1,12,19,25-tetraoxo-16-oxa-13,20,24-t riazanonacos-1-yl]-4-hydroxy-2-pyrrolidinyl)methyl ester
tacttgtgtgatgtgacatgt

SEQ ID NO: 861 - RNA, 21 nt, synthetic construct
  source 1..21: mol_type = other RNA
  modified_base 1: mod_base = OTHER; note = 2'-O-methyluridine-3'-phosphorothioate
  modified_base 2: mod_base = OTHER; note = 2'-O-methylguanosine-3'-phosphorothioate
  modified_base 3: mod_base = OTHER; note = 2'-O-methyladenosine-3'-phosphate
  modified_base 4: mod_base = OTHER; note = 2'-O-methylcytidine-3'-phosphate
  modified_base 5: mod_base = OTHER; note = 2'-O-methyladenosine-3'-phosphate
  modified_base 6: mod_base = OTHER; note = 2'-O-methyluridine-3'-phosphate
  modified_base 7: mod_base = OTHER; note = 2'-deoxy-2'-fluoroguanosine-3'-phosphate
  modified_base 8: mod_base = OTHER; note = 2'-O-methylguanosine-3'-phosphate
  modified_base 9: mod_base = OTHER; note = 2'-deoxy-2'-fluoroguanosine-3'-phosphate
  modified_base 10: mod_base = OTHER; note = 2'-deoxy-2'-fluorocytidine-3'-phosphate
  modified_base 11: mod_base = OTHER; note = 2'-deoxy-2'-fluoroadenosine-3'-phosphate
  modified_base 12: mod_base = OTHER; note = 2'-O-methyladenosine-3'-phosphate
  modified_base 13: mod_base = OTHER; note = 2'-O-methylcytidine-3'-phosphate
  modified_base 14: mod_base = OTHER; note = 2'-O-methyladenosine-3'-phosphate
  modified_base 15: mod_base = OTHER; note = 2'-O-methylcytidine-3'-phosphate
  modified_base 16: mod_base = OTHER; note = 2'-O-methyladenosine-3'-phosphate
  modified_base 17: mod_base = OTHER; note = 2'-O-methyladenosine-3'-phosphate
  modified_base 18: mod_base = OTHER; note = 2'-O-methylguanosine-3'-phosphate
  modified_base 19: mod_base = OTHER; note = 2'-O-methyladenosine-3'-phosphate
  modified_base 20: mod_base = OTHER; note = 2'-O-methyladenosine-3'-phosphate
  modified_base 21: mod_base = OTHER; note = 2'-O-methyluridine-3'-phosphate ((2S,4R)-1-[29-[[2-(acetylamino)-2-deoxy-beta-D-galactopyra nosyl]oxy]-14,14-bis[[3-[[3-[[5-[[2-(acetylamino)-2-deoxy-b eta-D-galactopyranosyl]oxy]-1-oxopentyl]amino]propyl]amino] -3-oxopropoxy]methyl]-1,12,19,25-tetraoxo-16-oxa-13,20,24-t riazanonacos-1-yl]-4-hydroxy-2-pyrrolidinyl)methyl ester
tgacatgggcaacacaagaat

SEQ ID NO: 862 - RNA, 21 nt, synthetic construct
  source 1..21: mol_type = other RNA
  modified_base 1: mod_base = OTHER; note = 2'-O-methylguanosine-3'-phosphorothioate
  modified_base 2: mod_base = OTHER; note = 2'-O-methylguanosine-3'-phosphorothioate
  modified_base 3: mod_base = OTHER; note = 2'-O-methylguanosine-3'-phosphate
  modified_base 4: mod_base = OTHER; note = 2'-O-methylcytidine-3'-phosphate
  modified_base 5: mod_base = OTHER; note = 2'-O-methyladenosine-3'-phosphate
  modified_base 6: mod_base = OTHER; note = 2'-O-methyladenosine-3'-phosphate
  modified_base 7: mod_base = OTHER; note = 2'-deoxy-2'-fluorocytidine-3'-phosphate
  modified_base 8: mod_base = OTHER; note = 2'-O-methyladenosine-3'-phosphate
  modified_base 9: mod_base = OTHER; note = 2'-deoxy-2'-fluorocytidine-3'-phosphate
  modified_base 10: mod_base = OTHER; note = 2'-deoxy-2'-fluoroadenosine-3'-phosphate
  modified_base 11: mod_base = OTHER; note = 2'-deoxy-2'-fluoroadenosine-3'-phosphate
  modified_base 12: mod_base = OTHER; note = 2'-O-methylguanosine-3'-phosphate
  modified_base 13: mod_base = OTHER; note = 2'-O-methyladenosine-3'-phosphate
  modified_base 14: mod_base = OTHER; note = 2'-O-methyladenosine-3'-phosphate
  modified_base 15: mod_base = OTHER; note = 2'-O-methyladenosine-3'-phosphate
  modified_base 16: mod_base = OTHER; note = 2'-O-methylguanosine-3'-phosphate
  modified_base 17: mod_base = OTHER; note = 2'-O-methyladenosine-3'-phosphate
  modified_base 18: mod_base = OTHER; note = 2'-O-methyladenosine-3'-phosphate
  modified_base 19: mod_base = OTHER; note = 2'-O-methyluridine-3'-phosphate
  modified_base 20: mod_base = OTHER; note = 2'-O-methyluridine-3'-phosphate
  modified_base 21: mod_base = OTHER; note = 2'-O-methyluridine-3'-phosphate ((2S,4R)-1-[29-[[2-(acetylamino)-2-deoxy-beta-D-galactopyra nosyl]oxy]-14,14-bis[[3-[[3-[[5-[[2-(acetylamino)-2-deoxy-b eta-D-galactopyranosyl]oxy]-1-oxopentyl]amino]propyl]amino] -3-oxopropoxy]methyl]-1,12,19,25-tetraoxo-16-oxa-13,20,24-t riazanonacos-1-yl]-4-hydroxy-2-pyrrolidinyl)methyl ester
gggcaacacaagaaagaattt

SEQ ID NO: 863 - RNA, 21 nt, synthetic construct
  source 1..21: mol_type = other RNA
  modified_base 1: mod_base = OTHER; note = 2'-O-methylcytidine-3'-phosphorothioate
  modified_base 2: mod_base = OTHER; note = 2'-O-methyladenosine-3'-phosphorothioate
  modified_base 3: mod_base = OTHER; note = 2'-O-methylcytidine-3'-phosphate
  modified_base 4: mod_base = OTHER; note = 2'-O-methyladenosine-3'-phosphate
  modified_base 5: mod_base = OTHER; note = 2'-O-methyladenosine-3'-phosphate
  modified_base 6: mod_base = OTHER; note = 2'-O-methylguanosine-3'-phosphate
  modified_base 7: mod_base = OTHER; note = 2'-deoxy-2'-fluoroadenosine-3'-phosphate
  modified_base 8: mod_base = OTHER; note = 2'-O-methyladenosine-3'-phosphate
  modified_base 9: mod_base = OTHER; note = 2'-deoxy-2'-fluoroadenosine-3'-phosphate
  modified_base 10: mod_base = OTHER; note = 2'-deoxy-2'-fluoroguanosine-3'-phosphate
  modified_base 11: mod_base = OTHER; note = 2'-deoxy-2'-fluoroadenosine-3'-phosphate
  modified_base 12: mod_base = OTHER; note = 2'-O-methyladenosine-3'-phosphate
  modified_base 13: mod_base = OTHER; note = 2'-O-methyluridine-3'-phosphate
  modified_base 14: mod_base = OTHER; note = 2'-O-methyluridine-3'-phosphate
  modified_base 15: mod_base = OTHER; note = 2'-O-methyluridine-3'-phosphate
  modified_base 16: mod_base = OTHER; note = 2'-O-methylcytidine-3'-phosphate
  modified_base 17: mod_base = OTHER; note = 2'-O-methyluridine-3'-phosphate
  modified_base 18: mod_base = OTHER; note = 2'-O-methyluridine-3'-phosphate
  modified_base 19: mod_base = OTHER; note = 2'-O-methyluridine-3'-phosphate
  modified_base 20: mod_base = OTHER; note = 2'-O-methylguanosine-3'-phosphate
  modified_base 21: mod_base = OTHER; note = 2'-O-methyluridine-3'-phosphate ((2S,4R)-1-[29-[[2-(acetylamino)-2-deoxy-beta-D-galactopyra nosyl]oxy]-14,14-bis[[3-[[3-[[5-[[2-(acetylamino)-2-deoxy-b eta-D-galactopyranosyl]oxy]-1-oxopentyl]amino]propyl]amino] -3-oxopropoxy]methyl]-1,12,19,25-tetraoxo-16-oxa-13,20,24-t riazanonacos-1-yl]-4-hydroxy-2-pyrrolidinyl)methyl ester
cacaagaaagaatttctttgt

SEQ ID NO: 864 - RNA, 21 nt, synthetic construct
  source 1..21: mol_type = other RNA
  modified_base 1: mod_base = OTHER; note = 2'-O-methyladenosine-3'-phosphorothioate
  modified_base 2: mod_base = OTHER; note = 2'-O-methyladenosine-3'-phosphorothioate
  modified_base 3: mod_base = OTHER; note = 2'-O-methyladenosine-3'-phosphate
  modified_base 4: mod_base = OTHER; note = 2'-O-methylguanosine-3'-phosphate
  modified_base 5: mod_base = OTHER; note = 2'-O-methyladenosine-3'-phosphate
  modified_base 6: mod_base = OTHER; note = 2'-O-methyladenosine-3'-phosphate
  modified_base 7: mod_base = OTHER; note = 2'-deoxy-2'-fluorouridine-3'-phosphate
  modified_base 8: mod_base = OTHER; note = 2'-O-methyluridine-3'-phosphate
  modified_base 9: mod_base = OTHER; note = 2'-deoxy-2'-fluorouridine-3'-phosphate
  modified_base 10: mod_base = OTHER; note = 2'-deoxy-2'-fluorocytidine-3'-phosphate
  modified_base 11: mod_base = OTHER; note = 2'-deoxy-2'-fluorouridine-3'-phosphate
  modified_base 12: mod_base = OTHER; note = 2'-O-methyluridine-3'-phosphate
  modified_base 13: mod_base = OTHER; note = 2'-O-methyluridine-3'-phosphate
  modified_base 14: mod_base = OTHER; note = 2'-O-methylguanosine-3'-phosphate
  modified_base 15: mod_base = OTHER; note = 2'-O-methylcytidine-3'-phosphate
  modified_base 16: mod_base = OTHER; note = 2'-O-methyladenosine-3'-phosphate
  modified_base 17: mod_base = OTHER; note = 2'-O-methylguanosine-3'-phosphate
  modified_base 18: mod_base = OTHER; note = 2'-O-methyluridine-3'-phosphate
  modified_base 19: mod_base = OTHER; note = 2'-O-methylguanosine-3'-phosphate
  modified_base 20: mod_base = OTHER; note = 2'-O-methylguanosine-3'-phosphate
  modified_base 21: mod_base = OTHER; note = 2'-O-methyluridine-3'-phosphate ((2S,4R)-1-[29-[[2-(acetylamino)-2-deoxy-beta-D-galactopyra nosyl]oxy]-14,14-bis[[3-[[3-[[5-[[2-(acetylamino)-2-deoxy-b eta-D-galactopyranosyl]oxy]-1-oxopentyl]amino]propyl]amino] -3-oxopropoxy]methyl]-1,12,19,25-tetraoxo-16-oxa-13,20,24-t riazanonacos-1-yl]-4-hydroxy-2-pyrrolidinyl)methyl ester
aaagaatttctttgcagtggt

SEQ ID NO: 865 - RNA, 21 nt, synthetic construct
  source 1..21: mol_type = other RNA
  modified_base 1: mod_base = OTHER; note = 2'-O-methylguanosine-3'-phosphorothioate
  modified_base 2: mod_base = OTHER; note = 2'-O-methyluridine-3'-phosphorothioate
  modified_base 3: mod_base = OTHER; note = 2'-O-methylguanosine-3'-phosphate
  modified_base 4: mod_base = OTHER; note = 2'-O-methylguanosine-3'-phosphate
  modified_base 5: mod_base = OTHER; note = 2'-O-methylcytidine-3'-phosphate
  modified_base 6: mod_base = OTHER; note = 2'-O-methyluridine-3'-phosphate
  modified_base 7: mod_base = OTHER; note = 2'-deoxy-2'-fluorocytidine-3'-phosphate
  modified_base 8: mod_base = OTHER; note = 2'-O-methyladenosine-3'-phosphate
  modified_base 9: mod_base = OTHER; note = 2'-deoxy-2'-fluoroguanosine-3'-phosphate
  modified_base 10: mod_base = OTHER; note = 2'-deoxy-2'-fluoroguanosine-3'-phosphate
  modified_base 11: mod_base = OTHER; note = 2'-deoxy-2'-fluoroadenosine-3'-phosphate
  modified_base 12: mod_base = OTHER; note = 2'-O-methylguanosine-3'-phosphate
  modified_base 13: mod_base = OTHER; note = 2'-O-methylguanosine-3'-phosphate
  modified_base 14: mod_base = OTHER; note = 2'-O-methyladenosine-3'-phosphate
  modified_base 15: mod_base = OTHER; note = 2'-O-methyluridine-3'-phosphate
  modified_base 16: mod_base = OTHER; note = 2'-O-methyluridine-3'-phosphate
  modified_base 17: mod_base = OTHER; note = 2'-O-methylcytidine-3'-phosphate
  modified_base 18: mod_base = OTHER; note = 2'-O-methyladenosine-3'-phosphate
  modified_base 19: mod_base = OTHER; note = 2'-O-methylguanosine-3'-phosphate
  modified_base 20: mod_base = OTHER; note = 2'-O-methyladenosine-3'-phosphate
  modified_base 21: mod_base = OTHER; note = 2'-O-methyluridine-3'-phosphate ((2S,4R)-1-[29-[[2-(acetylamino)-2-deoxy-beta-D-galactopyra nosyl]oxy]-14,14-bis[[3-[[3-[[5-[[2-(acetylamino)-2-deoxy-b eta-D-galactopyranosyl]oxy]-1-oxopentyl]amino]propyl]amino] -3-oxopropoxy]methyl]-1,12,19,25-tetraoxo-16-oxa-13,20,24-t riazanonacos-1-yl]-4-hydroxy-2-pyrrolidinyl)methyl ester
gtggctcaggaggattcagat

SEQ ID NO: 866 - RNA, 21 nt, synthetic construct
  source 1..21: mol_type = other RNA
  modified_base 1: mod_base = OTHER; note = 2'-O-methylcytidine-3'-phosphorothioate
  modified_base 2: mod_base = OTHER; note = 2'-O-methyladenosine-3'-phosphorothioate
  modified_base 3: mod_base = OTHER; note = 2'-O-methylguanosine-3'-phosphate
  modified_base 4: mod_base = OTHER; note = 2'-O-methylguanosine-3'-phosphate
  modified_base 5: mod_base = OTHER; note = 2'-O-methyladenosine-3'-phosphate
  modified_base 6: mod_base = OTHER; note = 2'-O-methylguanosine-3'-phosphate
  modified_base 7: mod_base = OTHER; note = 2'-deoxy-2'-fluoroguanosine-3'-phosphate
  modified_base 8: mod_base = OTHER; note = 2'-O-methyladenosine-3'-phosphate
  modified_base 9: mod_base = OTHER; note = 2'-deoxy-2'-fluorouridine-3'-phosphate
  modified_base 10: mod_base = OTHER; note = 2'-deoxy-2'-fluorouridine-3'-phosphate
  modified_base 11: mod_base = OTHER; note = 2'-deoxy-2'-fluorocytidine-3'-phosphate
  modified_base 12: mod_base = OTHER; note = 2'-O-methyladenosine-3'-phosphate
  modified_base 13: mod_base = OTHER; note = 2'-O-methylguanosine-3'-phosphate
  modified_base 14: mod_base = OTHER; note = 2'-O-methyladenosine-3'-phosphate
  modified_base 15: mod_base = OTHER; note = 2'-O-methyladenosine-3'-phosphate
  modified_base 16: mod_base = OTHER; note = 2'-O-methylcytidine-3'-phosphate
  modified_base 17: mod_base = OTHER; note = 2'-O-methyluridine-3'-phosphate
  modified_base 18: mod_base = OTHER; note = 2'-O-methyladenosine-3'-phosphate
  modified_base 19: mod_base = OTHER; note = 2'-O-methyluridine-3'-phosphate
  modified_base 20: mod_base = OTHER; note = 2'-O-methyluridine-3'-phosphate
  modified_base 21: mod_base = OTHER; note = 2'-O-methyluridine-3'-phosphate ((2S,4R)-1-[29-[[2-(acetylamino)-2-deoxy-beta-D-galactopyra nosyl]oxy]-14,14-bis[[3-[[3-[[5-[[2-(acetylamino)-2-deoxy-b eta-D-galactopyranosyl]oxy]-1-oxopentyl]amino]propyl]amino] -3-oxopropoxy]methyl]-1,12,19,25-tetraoxo-16-oxa-13,20,24-t riazanonacos-1-yl]-4-hydroxy-2-pyrrolidinyl)methyl ester
caggaggattcagaactattt

SEQ ID NO: 867 - RNA, 21 nt, synthetic construct
  source 1..21: mol_type = other RNA
  modified_base 1: mod_base = OTHER; note = 2'-O-methylguanosine-3'-phosphorothioate
  modified_base 2: mod_base = OTHER; note = 2'-O-methyladenosine-3'-phosphorothioate
  modified_base 3: mod_base = OTHER; note = 2'-O-methyluridine-3'-phosphate
  modified_base 4: mod_base = OTHER; note = 2'-O-methyluridine-3'-phosphate
  modified_base 5: mod_base = OTHER; note = 2'-O-methylcytidine-3'-phosphate
  modified_base 6: mod_base = OTHER; note = 2'-O-methyladenosine-3'-phosphate
  modified_base 7: mod_base = OTHER; note = 2'-deoxy-2'-fluoroguanosine-3'-phosphate
  modified_base 8: mod_base = OTHER; note = 2'-O-methyladenosine-3'-phosphate
  modified_base 9: mod_base = OTHER; note = 2'-deoxy-2'-fluoroadenosine-3'-phosphate
  modified_base 10: mod_base = OTHER; note = 2'-deoxy-2'-fluorocytidine-3'-phosphate
  modified_base 11: mod_base = OTHER; note = 2'-deoxy-2'-fluorouridine-3'-phosphate
  modified_base 12: mod_base = OTHER; note = 2'-O-methyladenosine-3'-phosphate
  modified_base 13: mod_base = OTHER; note = 2'-O-methyluridine-3'-phosphate
  modified_base 14: mod_base = OTHER; note = 2'-O-methyluridine-3'-phosphate
  modified_base 15: mod_base = OTHER; note = 2'-O-methylcytidine-3'-phosphate
  modified_base 16: mod_base = OTHER; note = 2'-O-methylguanosine-3'-phosphate
  modified_base 17: mod_base = OTHER; note = 2'-O-methylguanosine-3'-phosphate
  modified_base 18: mod_base = OTHER; note = 2'-O-methyluridine-3'-phosphate
  modified_base 19: mod_base = OTHER; note = 2'-O-methylcytidine-3'-phosphate
  modified_base 20: mod_base = OTHER; note = 2'-O-methyladenosine-3'-phosphate
  modified_base 21: mod_base = OTHER; note = 2'-O-methyluridine-3'-phosphate ((2S,4R)-1-[29-[[2-(acetylamino)-2-deoxy-beta-D-galactopyra nosyl]oxy]-14,14-bis[[3-[[3-[[5-[[2-(acetylamino)-2-deoxy-b eta-D-galactopyranosyl]oxy]-1-oxopentyl]amino]propyl]amino] -3-oxopropoxy]methyl]-1,12,19,25-tetraoxo-16-oxa-13,20,24-t riazanonacos-1-yl]-4-hydroxy-2-pyrrolidinyl)methyl ester
gattcagaactattcggtcat

SEQ ID NO: 868 - RNA, 21 nt, synthetic construct
  source 1..21: mol_type = other RNA
  modified_base 1: mod_base = OTHER; note = 2'-O-methylcytidine-3'-phosphorothioate
  modified_base 2: mod_base = OTHER; note = 2'-O-methyluridine-3'-phosphorothioate
  modified_base 3: mod_base = OTHER; note = 2'-O-methyladenosine-3'-phosphate
  modified_base 4: mod_base = OTHER; note = 2'-O-methyluridine-3'-phosphate
  modified_base 5: mod_base = OTHER; note = 2'-O-methyluridine-3'-phosphate
  modified_base 6: mod_base = OTHER; note = 2'-O-methylcytidine-3'-phosphate
  modified_base 7: mod_base = OTHER; note = 2'-deoxy-2'-fluoroguanosine-3'-phosphate
  modified_base 8: mod_base = OTHER; note = 2'-O-methylguanosine-3'-phosphate
  modified_base 9: mod_base = OTHER; note = 2'-deoxy-2'-fluorouridine-3'-phosphate
  modified_base 10: mod_base = OTHER; note = 2'-deoxy-2'-fluorocytidine-3'-phosphate
  modified_base 11: mod_base = OTHER; note = 2'-deoxy-2'-fluoroadenosine-3'-phosphate
  modified_base 12: mod_base = OTHER; note = 2'-O-methyluridine-3'-phosphate
  modified_base 13: mod_base = OTHER; note = 2'-O-methylguanosine-3'-phosphate
  modified_base 14: mod_base = OTHER; note = 2'-O-methylguanosine-3'-phosphate
  modified_base 15: mod_base = OTHER; note = 2'-O-methyladenosine-3'-phosphate
  modified_base 16: mod_base = OTHER; note = 2'-O-methyluridine-3'-phosphate
  modified_base 17: mod_base = OTHER; note = 2'-O-methyladenosine-3'-phosphate
  modified_base 18: mod_base = OTHER; note = 2'-O-methyluridine-3'-phosphate
  modified_base 19: mod_base = OTHER; note = 2'-O-methyluridine-3'-phosphate
  modified_base 20: mod_base = OTHER; note = 2'-O-methyluridine-3'-phosphate
  modified_base 21: mod_base = OTHER; note = 2'-O-methyluridine-3'-phosphate ((2S,4R)-1-[29-[[2-(acetylamino)-2-deoxy-beta-D-galactopyra nosyl]oxy]-14,14-bis[[3-[[3-[[5-[[2-(acetylamino)-2-deoxy-b eta-D-galactopyranosyl]oxy]-1-oxopentyl]amino]propyl]amino] -3-oxopropoxy]methyl]-1,12,19,25-tetraoxo-16-oxa-13,20,24-t riazanonacos-1-yl]-4-hydroxy-2-pyrrolidinyl)methyl ester
ctattcggtcatggatatttt

SEQ ID NO: 869 - RNA, 21 nt, synthetic construct
  source 1..21: mol_type = other RNA
  modified_base 1: mod_base = OTHER; note = 2'-O-methylguanosine-3'-phosphorothioate
  modified_base 2: mod_base = OTHER; note = 2'-O-methylguanosine-3'-phosphorothioate
  modified_base 3: mod_base = OTHER; note = 2'-O-methyluridine-3'-phosphate
  modified_base 4: mod_base = OTHER; note = 2'-O-methylcytidine-3'-phosphate
  modified_base 5: mod_base = OTHER; note = 2'-O-methyladenosine-3'-phosphate
  modified_base 6: mod_base = OTHER; note = 2'-O-methyluridine-3'-phosphate
  modified_base 7: mod_base = OTHER; note = 2'-deoxy-2'-fluoroguanosine-3'-phosphate
  modified_base 8: mod_base = OTHER; note = 2'-O-methylguanosine-3'-phosphate
  modified_base 9: mod_base = OTHER; note = 2'-deoxy-2'-fluoroadenosine-3'-phosphate
  modified_base 10: mod_base = OTHER; note = 2'-deoxy-2'-fluorouridine-3'-phosphate
  modified_base 11: mod_base = OTHER; note = 2'-deoxy-2'-fluoroadenosine-3'-phosphate
  modified_base 12: mod_base = OTHER; note = 2'-O-methyluridine-3'-phosphate
  modified_base 13: mod_base = OTHER; note = 2'-O-methyluridine-3'-phosphate
  modified_base 14: mod_base = OTHER; note = 2'-O-methyluridine-3'-phosphate
  modified_base 15: mod_base = OTHER; note = 2'-O-methylguanosine-3'-phosphate
  modified_base 16: mod_base = OTHER; note = 2'-O-methyluridine-3'-phosphate
  modified_base 17: mod_base = OTHER; note = 2'-O-methylguanosine-3'-phosphate
  modified_base 18: mod_base = OTHER; note = 2'-O-methyladenosine-3'-phosphate
  modified_base 19: mod_base = OTHER; note = 2'-O-methylcytidine-3'-phosphate
  modified_base 20: mod_base = OTHER; note = 2'-O-methyluridine-3'-phosphate
  modified_base 21: mod_base = OTHER; note = 2'-O-methyluridine-3'-phosphate ((2S,4R)-1-[29-[[2-(acetylamino)-2-deoxy-beta-D-galactopyra nosyl]oxy]-14,14-bis[[3-[[3-[[5-[[2-(acetylamino)-2-deoxy-b eta-D-galactopyranosyl]oxy]-1-oxopentyl]amino]propyl]amino] -3-oxopropoxy]methyl]-1,12,19,25-tetraoxo-16-oxa-13,20,24-t riazanonacos-1-yl]-4-hydroxy-2-pyrrolidinyl)methyl ester
ggtcatggatatttgtgactt

SEQ ID NO: 870 - RNA, 21 nt, synthetic construct
  source 1..21: mol_type = other RNA
  modified_base 1: mod_base = OTHER; note = 2'-O-methylguanosine-3'-phosphorothioate
  modified_base 2: mod_base = OTHER; note = 2'-O-methylguanosine-3'-phosphorothioate
  modified_base 3: mod_base = OTHER; note = 2'-O-methyladenosine-3'-phosphate
  modified_base 4: mod_base = OTHER; note = 2'-O-methyluridine-3'-phosphate
  modified_base 5: mod_base = OTHER; note = 2'-O-methyladenosine-3'-phosphate
  modified_base 6: mod_base = OTHER; note = 2'-O-methyluridine-3'-phosphate
  modified_base 7: mod_base = OTHER; note = 2'-deoxy-2'-fluorouridine-3'-phosphate
  modified_base 8: mod_base = OTHER; note = 2'-O-methyluridine-3'-phosphate
  modified_base 9: mod_base = OTHER; note = 2'-deoxy-2'-fluoroguanosine-3'-phosphate
  modified_base 10: mod_base = OTHER; note = 2'-deoxy-2'-fluorouridine-3'-phosphate
  modified_base 11: mod_base = OTHER; note = 2'-deoxy-2'-fluoroguanosine-3'-phosphate
  modified_base 12: mod_base = OTHER; note = 2'-O-methyladenosine-3'-phosphate
  modified_base 13: mod_base = OTHER; note = 2'-O-methylcytidine-3'-phosphate
  modified_base 14: mod_base = OTHER; note = 2'-O-methyluridine-3'-phosphate
  modified_base 15: mod_base = OTHER; note = 2'-O-methyladenosine-3'-phosphate
  modified_base 16: mod_base = OTHER; note = 2'-O-methyluridine-3'-phosphate
  modified_base 17: mod_base = OTHER; note = 2'-O-methylguanosine-3'-phosphate
  modified_base 18: mod_base = OTHER; note = 2'-O-methyladenosine-3'-phosphate
  modified_base 19: mod_base = OTHER; note = 2'-O-methyluridine-3'-phosphate
  modified_base 20: mod_base = OTHER; note = 2'-O-methylguanosine-3'-phosphate
  modified_base 21: mod_base = OTHER; note = 2'-O-methyluridine-3'-phosphate ((2S,4R)-1-[29-[[2-(acetylamino)-2-deoxy-beta-D-galactopyra nosyl]oxy]-14,14-bis[[3-[[3-[[5-[[2-(acetylamino)-2-deoxy-b eta-D-galactopyranosyl]oxy]-1-oxopentyl]amino]propyl]amino] -3-oxopropoxy]methyl]-1,12,19,25-tetraoxo-16-oxa-13,20,24-t riazanonacos-1-yl]-4-hydroxy-2-pyrrolidinyl)methyl ester
ggatatttgtgactatgatgt

SEQ ID NO: 871 - RNA, 21 nt, synthetic construct
  source 1..21: mol_type = other RNA
  modified_base 1: mod_base = OTHER; note = 2'-O-methyluridine-3'-phosphorothioate
  modified_base 2: mod_base = OTHER; note = 2'-O-methylguanosine-3'-phosphorothioate
  modified_base 3: mod_base = OTHER; note = 2'-O-methyluridine-3'-phosphate
  modified_base 4: mod_base = OTHER; note = 2'-O-methylguanosine-3'-phosphate
  modified_base 5: mod_base = OTHER; note = 2'-O-methyladenosine-3'-phosphate
  modified_base 6: mod_base = OTHER; note = 2'-O-methylcytidine-3'-phosphate
  modified_base 7: mod_base = OTHER; note = 2'-deoxy-2'-fluorouridine-3'-phosphate
  modified_base 8: mod_base = OTHER; note = 2'-O-methyladenosine-3'-phosphate
  modified_base 9: mod_base = OTHER; note = 2'-deoxy-2'-fluorouridine-3'-phosphate
  modified_base 10: mod_base = OTHER; note = 2'-deoxy-2'-fluoroguanosine-3'-phosphate
  modified_base 11: mod_base = OTHER; note = 2'-deoxy-2'-fluoroadenosine-3'-phosphate
  modified_base 12: mod_base = OTHER; note = 2'-O-methyluridine-3'-phosphate
  modified_base 13: mod_base = OTHER; note = 2'-O-methylguanosine-3'-phosphate
  modified_base 14: mod_base = OTHER; note = 2'-O-methyladenosine-3'-phosphate
  modified_base 15: mod_base = OTHER; note = 2'-O-methyladenosine-3'-phosphate
  modified_base 16: mod_base = OTHER; note = 2'-O-methyluridine-3'-phosphate
  modified_base 17: mod_base = OTHER; note = 2'-O-methylcytidine-3'-phosphate
  modified_base 18: mod_base = OTHER; note = 2'-O-methylcytidine-3'-phosphate
  modified_base 19: mod_base = OTHER; note = 2'-O-methyladenosine-3'-phosphate
  modified_base 20: mod_base = OTHER; note = 2'-O-methylguanosine-3'-phosphate
  modified_base 21: mod_base = OTHER; note = 2'-O-methyluridine-3'-phosphate ((2S,4R)-1-[29-[[2-(acetylamino)-2-deoxy-beta-D-galactopyra nosyl]oxy]-14,14-bis[[3-[[3-[[5-[[2-(acetylamino)-2-deoxy-b eta-D-galactopyranosyl]oxy]-1-oxopentyl]amino]propyl]amino] -3-oxopropoxy]methyl]-1,12,19,25-tetraoxo-16-oxa-13,20,24-t riazanonacos-1-yl]-4-hydroxy-2-pyrrolidinyl)methyl ester
tgtgactatgatgaatccagt

SEQ ID NO: 872 - RNA, 21 nt, synthetic construct
  source 1..21: mol_type = other RNA
  modified_base 1: mod_base = OTHER; note = 2'-O-methylguanosine-3'-phosphorothioate
  modified_base 2: mod_base = OTHER; note = 2'-O-methyladenosine-3'-phosphorothioate
  modified_base 3: mod_base = OTHER; note = 2'-O-methyluridine-3'-phosphate
  modified_base 4: mod_base = OTHER; note = 2'-O-methylguanosine-3'-phosphate
  modified_base 5: mod_base = OTHER; note = 2'-O-methyladenosine-3'-phosphate
  modified_base 6: mod_base = OTHER; note = 2'-O-methyladenosine-3'-phosphate
  modified_base 7: mod_base = OTHER; note = 2'-deoxy-2'-fluorouridine-3'-phosphate
  modified_base 8: mod_base = OTHER; note = 2'-O-methylcytidine-3'-phosphate
  modified_base 9: mod_base = OTHER; note = 2'-deoxy-2'-fluorocytidine-3'-phosphate
  modified_base 10: mod_base = OTHER; note = 2'-deoxy-2'-fluoroadenosine-3'-phosphate
  modified_base 11: mod_base = OTHER; note = 2'-deoxy-2'-fluoroguanosine-3'-phosphate
  modified_base 12: mod_base = OTHER; note = 2'-O-methyluridine-3'-phosphate
  modified_base 13: mod_base = OTHER; note = 2'-O-methylguanosine-3'-phosphate
  modified_base 14: mod_base = OTHER; note = 2'-O-methylguanosine-3'-phosphate
  modified_base 15: mod_base = OTHER; note = 2'-O-methyladenosine-3'-phosphate
  modified_base 16: mod_base = OTHER; note = 2'-O-methyladenosine-3'-phosphate
  modified_base 17: mod_base = OTHER; note = 2'-O-methylguanosine-3'-phosphate
  modified_base 18: mod_base = OTHER; note = 2'-O-methyladenosine-3'-phosphate
  modified_base 19: mod_base = OTHER; note = 2'-O-methyluridine-3'-phosphate
  modified_base 20: mod_base = OTHER; note = 2'-O-methylguanosine-3'-phosphate
  modified_base 21: mod_base = OTHER; note = 2'-O-methyluridine-3'-phosphate ((2S,4R)-1-[29-[[2-(acetylamino)-2-deoxy-beta-D-galactopyra nosyl]oxy]-14,14-bis[[3-[[3-[[5-[[2-(acetylamino)-2-deoxy-b eta-D-galactopyranosyl]oxy]-1-oxopentyl]amino]propyl]amino] -3-oxopropoxy]methyl]-1,12,19,25-tetraoxo-16-oxa-13,20,24-t riazanonacos-1-yl]-4-hydroxy-2-pyrrolidinyl)methyl ester
gatgaatccagtggaagatgt

SEQ ID NO: 873 - RNA, 21 nt, synthetic construct
  source 1..21: mol_type = other RNA
  modified_base 1: mod_base = OTHER; note = 2'-O-methylcytidine-3'-phosphorothioate
  modified_base 2: mod_base = OTHER; note = 2'-O-methyladenosine-3'-phosphorothioate
  modified_base 3: mod_base = OTHER; note = 2'-O-methylguanosine-3'-phosphate
  modified_base 4: mod_base = OTHER; note = 2'-O-methyluridine-3'-phosphate
  modified_base 5: mod_base = OTHER; note = 2'-O-methylguanosine-3'-phosphate
  modified_base 6: mod_base = OTHER; note = 2'-O-methylguanosine-3'-phosphate
  modified_base 7: mod_base = OTHER; note = 2'-deoxy-2'-fluoroadenosine-3'-phosphate
  modified_base 8: mod_base = OTHER; note = 2'-O-methyladenosine-3'-phosphate
  modified_base 9: mod_base = OTHER; note = 2'-deoxy-2'-fluoroguanosine-3'-phosphate
  modified_base 10: mod_base = OTHER; note = 2'-deoxy-2'-fluoroadenosine-3'-phosphate
  modified_base 11: mod_base = OTHER; note = 2'-deoxy-2'-fluorouridine-3'-phosphate
  modified_base 12: mod_base = OTHER; note = 2'-O-methylguanosine-3'-phosphate
  modified_base 13: mod_base = OTHER; note = 2'-O-methylguanosine-3'-phosphate
  modified_base 14: mod_base = OTHER; note = 2'-O-methyladenosine-3'-phosphate
  modified_base 15: mod_base = OTHER; note = 2'-O-methyladenosine-3'-phosphate
  modified_base 16: mod_base = OTHER; note = 2'-O-methylcytidine-3'-phosphate
  modified_base 17: mod_base = OTHER; note = 2'-O-methyluridine-3'-phosphate
  modified_base 18: mod_base = OTHER; note = 2'-O-methylguanosine-3'-phosphate
  modified_base 19: mod_base = OTHER; note = 2'-O-methylcytidine-3'-phosphate
  modified_base 20: mod_base = OTHER; note = 2'-O-methyluridine-3'-phosphate
  modified_base 21: mod_base = OTHER; note = 2'-O-methyluridine-3'-phosphate ((2S,4R)-1-[29-[[2-(acetylamino)-2-deoxy-beta-D-galactopyra nosyl]oxy]-14,14-bis[[3-[[3-[[5-[[2-(acetylamino)-2-deoxy-b eta-D-galactopyranosyl]oxy]-1-oxopentyl]amino]propyl]amino] -3-oxopropoxy]methyl]-1,12,19,25-tetraoxo-16-oxa-13,20,24-t riazanonacos-1-yl]-4-hydroxy-2-pyrrolidinyl)methyl ester
cagtggaagatggaactgctt

SEQ ID NO: 874 - RNA, 21 nt, synthetic construct
  source 1..21: mol_type = other RNA
  modified_base 1: mod_base = OTHER; note = 2'-O-methyladenosine-3'-phosphorothioate
  modified_base 2: mod_base = OTHER; note = 2'-O-methyladenosine-3'-phosphorothioate
  modified_base 3: mod_base = OTHER; note = 2'-O-methylguanosine-3'-phosphate
  modified_base 4: mod_base = OTHER; note = 2'-O-methyladenosine-3'-phosphate
  modified_base 5: mod_base = OTHER; note = 2'-O-methyluridine-3'-phosphate
  modified_base 6: mod_base = OTHER; note = 2'-O-methylguanosine-3'-phosphate
  modified_base 7: mod_base = OTHER; note = 2'-deoxy-2'-fluoroguanosine-3'-phosphate
  modified_base 8: mod_base = OTHER; note = 2'-O-methyladenosine-3'-phosphate
  modified_base 9: mod_base = OTHER; note = 2'-deoxy-2'-fluoroadenosine-3'-phosphate
  modified_base 10: mod_base = OTHER; note = 2'-deoxy-2'-fluorocytidine-3'-phosphate
  modified_base 11: mod_base = OTHER; note = 2'-deoxy-2'-fluorouridine-3'-phosphate
  modified_base 12: mod_base = OTHER; note = 2'-O-methylguanosine-3'-phosphate
  modified_base 13: mod_base = OTHER; note = 2'-O-methylcytidine-3'-phosphate
  modified_base 14: mod_base = OTHER; note = 2'-O-methyluridine-3'-phosphate
  modified_base 15: mod_base = OTHER; note = 2'-O-methyluridine-3'-phosphate
  modified_base 16: mod_base = OTHER; note = 2'-O-methyladenosine-3'-phosphate
  modified_base 17: mod_base = OTHER; note = 2'-O-methylguanosine-3'-phosphate
  modified_base 18: mod_base = OTHER; note = 2'-O-methyluridine-3'-phosphate
  modified_base 19: mod_base = OTHER; note = 2'-O-methylguanosine-3'-phosphate
  modified_base 20: mod_base = OTHER; note = 2'-O-methylguanosine-3'-phosphate
  modified_base 21: mod_base = OTHER; note = 2'-O-methyluridine-3'-phosphate ((2S,4R)-1-[29-[[2-(acetylamino)-2-deoxy-beta-D-galactopyra nosyl]oxy]-14,14-bis[[3-[[3-[[5-[[2-(acetylamino)-2-deoxy-b eta-D-galactopyranosyl]oxy]-1-oxopentyl]amino]propyl]amino] -3-oxopropoxy]methyl]-1,12,19,25-tetraoxo-16-oxa-13,20,24-t riazanonacos-1-yl]-4-hydroxy-2-pyrrolidinyl)methyl ester
aagatggaactgcttagtggt

SEQ ID NO: 875 - RNA, 21 nt, synthetic construct
  source 1..21: mol_type = other RNA
  modified_base 1: mod_base = OTHER; note = 2'-O-methyladenosine-3'-phosphorothioate
  modified_base 2: mod_base = OTHER; note = 2'-O-methylcytidine-3'-phosphorothioate
  modified_base 3: mod_base = OTHER; note = 2'-O-methyluridine-3'-phosphate
  modified_base 4: mod_base = OTHER; note = 2'-O-methylguanosine-3'-phosphate
  modified_base 5: mod_base = OTHER; note = 2'-O-methylcytidine-3'-phosphate
  modified_base 6: mod_base = OTHER; note = 2'-O-methyluridine-3'-phosphate
  modified_base 7: mod_base = OTHER; note = 2'-deoxy-2'-fluorouridine-3'-phosphate
  modified_base 8: mod_base = OTHER; note = 2'-O-methyladenosine-3'-phosphate
  modified_base 9: mod_base = OTHER; note = 2'-deoxy-2'-fluoroguanosine-3'-phosphate
  modified_base 10: mod_base = OTHER; note = 2'-deoxy-2'-fluorouridine-3'-phosphate
  modified_base 11: mod_base = OTHER; note = 2'-deoxy-2'-fluoroguanosine-3'-phosphate
  modified_base 12: mod_base = OTHER; note = 2'-O-methylguanosine-3'-phosphate
  modified_base 13: mod_base = OTHER; note = 2'-O-methylcytidine-3'-phosphate
  modified_base 14: mod_base = OTHER; note = 2'-O-methyladenosine-3'-phosphate
  modified_base 15: mod_base = OTHER; note = 2'-O-methylcytidine-3'-phosphate
  modified_base 16: mod_base = OTHER; note = 2'-O-methylguanosine-3'-phosphate
  modified_base 17: mod_base = OTHER; note = 2'-O-methylguanosine-3'-phosphate
  modified_base 18: mod_base = OTHER; note = 2'-O-methylcytidine-3'-phosphate
  modified_base 19: mod_base = OTHER; note = 2'-O-methyladenosine-3'-phosphate
  modified_base 20: mod_base = OTHER; note = 2'-O-methyladenosine-3'-phosphate
  modified_base 21: mod_base = OTHER; note = 2'-O-methyluridine-3'-phosphate ((2S,4R)-1-[29-[[2-(acetylamino)-2-deoxy-beta-D-galactopyra nosyl]oxy]-14,14-bis[[3-[[3-[[5-[[2-(acetylamino)-2-deoxy-b eta-D-galactopyranosyl]oxy]-1-oxopentyl]amino]propyl]amino] -3-oxopropoxy]methyl]-1,12,19,25-tetraoxo-16-oxa-13,20,24-t riazanonacos-1-yl]-4-hydroxy-2-pyrrolidinyl)methyl ester
actgcttagtggcacggcaat

SEQ ID NO: 876 - RNA, 21 nt, synthetic construct
  source 1..21: mol_type = other RNA
  modified_base 1: mod_base = OTHER; note = 2'-O-methyluridine-3'-phosphorothioate
  modified_base 2: mod_base = OTHER; note = 2'-O-methyladenosine-3'-phosphorothioate
  modified_base 3: mod_base = OTHER; note = 2'-O-methylguanosine-3'-phosphate
  modified_base 4: mod_base = OTHER; note = 2'-O-methyluridine-3'-phosphate
  modified_base 5: mod_base = OTHER; note = 2'-O-methylguanosine-3'-phosphate
  modified_base 6: mod_base = OTHER; note = 2'-O-methylguanosine-3'-phosphate
  modified_base 7: mod_base = OTHER; note = 2'-deoxy-2'-fluorocytidine-3'-phosphate
  modified_base 8: mod_base = OTHER; note = 2'-O-methyladenosine-3'-phosphate
  modified_base 9: mod_base = OTHER; note = 2'-deoxy-2'-fluorocytidine-3'-phosphate
  modified_base 10: mod_base = OTHER; note = 2'-deoxy-2'-fluoroguanosine-3'-phosphate
  modified_base 11: mod_base = OTHER; note = 2'-deoxy-2'-fluoroguanosine-3'-phosphate
  modified_base 12: mod_base = OTHER; note = 2'-O-methylcytidine-3'-phosphate
  modified_base 13: mod_base = OTHER; note = 2'-O-methyladenosine-3'-phosphate
  modified_base 14: mod_base = OTHER; note = 2'-O-methyladenosine-3'-phosphate
  modified_base 15: mod_base = OTHER; note = 2'-O-methylcytidine-3'-phosphate
  modified_base 16: mod_base = OTHER; note = 2'-O-methyladenosine-3'-phosphate
  modified_base 17: mod_base = OTHER; note = 2'-O-methylcytidine-3'-phosphate
  modified_base 18: mod_base = OTHER; note = 2'-O-methyladenosine-3'-phosphate
  modified_base 19: mod_base = OTHER; note = 2'-O-methyluridine-3'-phosphate
  modified_base 20: mod_base = OTHER; note = 2'-O-methyluridine-3'-phosphate
  modified_base 21: mod_base = OTHER; note = 2'-O-methyluridine-3'-phosphate ((2S,4R)-1-[29-[[2-(acetylamino)-2-deoxy-beta-D-galactopyra nosyl]oxy]-14,14-bis[[3-[[3-[[5-[[2-(acetylamino)-2-deoxy-b eta-D-galactopyranosyl]oxy]-1-oxopentyl]amino]propyl]amino] -3-oxopropoxy]methyl]-1,12,19,25-tetraoxo-16-oxa-13,20,24-t riazanonacos-1-yl]-4-hydroxy-2-pyrrolidinyl)methyl ester
tagtggcacggcaacacattt

SEQ ID NO: 877 - RNA, 21 nt, synthetic construct
  source 1..21: mol_type = other RNA
  modified_base 1: mod_base = OTHER; note = 2'-O-methylguanosine-3'-phosphorothioate
  modified_base 2: mod_base = OTHER; note = 2'-O-methylguanosine-3'-phosphorothioate
  modified_base 3: mod_base = OTHER; note = 2'-O-methylcytidine-3'-phosphate
  modified_base 4: mod_base = OTHER; note = 2'-O-methyladenosine-3'-phosphate
  modified_base 5: mod_base = OTHER; note = 2'-O-methyladenosine-3'-phosphate
  modified_base 6: mod_base = OTHER; note = 2'-O-methylcytidine-3'-phosphate
  modified_base 7: mod_base = OTHER; note = 2'-deoxy-2'-fluoroadenosine-3'-phosphate
  modified_base 8: mod_base = OTHER; note = 2'-O-methylcytidine-3'-phosphate
  modified_base 9: mod_base = OTHER; note = 2'-deoxy-2'-fluoroadenosine-3'-phosphate
  modified_base 10: mod_base = OTHER; note = 2'-deoxy-2'-fluorouridine-3'-phosphate
  modified_base 11: mod_base = OTHER; note = 2'-deoxy-2'-fluorouridine-3'-phosphate
  modified_base 12: mod_base = OTHER; note = 2'-O-methylguanosine-3'-phosphate
  modified_base 13: mod_base = OTHER; note = 2'-O-methyladenosine-3'-phosphate
  modified_base 14: mod_base = OTHER; note = 2'-O-methyladenosine-3'-phosphate
  modified_base 15: mod_base = OTHER; note = 2'-O-methyladenosine-3'-phosphate
  modified_base 16: mod_base = OTHER; note = 2'-O-methyluridine-3'-phosphate
  modified_base 17: mod_base = OTHER; note = 2'-O-methylguanosine-3'-phosphate
  modified_base 18: mod_base = OTHER; note = 2'-O-methyladenosine-3'-phosphate
  modified_base 19: mod_base = OTHER; note = 2'-O-methylguanosine-3'-phosphate
  modified_base 20: mod_base = OTHER; note = 2'-O-methyluridine-3'-phosphate
  modified_base 21: mod_base = OTHER; note = 2'-O-methyluridine-3'-phosphate ((2S,4R)-1-[29-[[2-(acetylamino)-2-deoxy-beta-D-galactopyra nosyl]oxy]-14,14-bis[[3-[[3-[[5-[[2-(acetylamino)-2-deoxy-b eta-D-galactopyranosyl]oxy]-1-oxopentyl]amino]propyl]amino] -3-oxopropoxy]methyl]-1,12,19,25-tetraoxo-16-oxa-13,20,24-t riazanonacos-1-yl]-4-hydroxy-2-pyrrolidinyl)methyl ester
ggcaacacattgaaatgagtt

SEQ ID NO: 878 - RNA, 21 nt, synthetic construct
  source 1..21: mol_type = other RNA
  modified_base 1: mod_base = OTHER; note = 2'-O-methyladenosine-3'-phosphorothioate
  modified_base 2: mod_base = OTHER; note = 2'-O-methylcytidine-3'-phosphorothioate
  modified_base 3: mod_base = OTHER; note = 2'-O-methyladenosine-3'-phosphate
  modified_base 4: mod_base = OTHER; note = 2'-O-methyluridine-3'-phosphate
  modified_base 5: mod_base = OTHER; note = 2'-O-methyluridine-3'-phosphate
  modified_base 6: mod_base = OTHER; note = 2'-O-methylguanosine-3'-phosphate
  modified_base 7: mod_base = OTHER; note = 2'-deoxy-2'-fluoroadenosine-3'-phosphate
  modified_base 8: mod_base = OTHER; note = 2'-O-methyladenosine-3'-phosphate
  modified_base 9: mod_base = OTHER; note = 2'-deoxy-2'-fluoroadenosine-3'-phosphate
  modified_base 10: mod_base = OTHER; note = 2'-deoxy-2'-fluorouridine-3'-phosphate
  modified_base 11: mod_base = OTHER; note = 2'-deoxy-2'-fluoroguanosine-3'-phosphate
  modified_base 12: mod_base = OTHER; note = 2'-O-methyladenosine-3'-phosphate
  modified_base 13: mod_base = OTHER; note = 2'-O-methylguanosine-3'-phosphate
  modified_base 14: mod_base = OTHER; note = 2'-O-methyluridine-3'-phosphate
  modified_base 15: mod_base = OTHER; note = 2'-O-methyladenosine-3'-phosphate
  modified_base 16: mod_base = OTHER; note = 2'-O-methylcytidine-3'-phosphate
  modified_base 17: mod_base = OTHER; note = 2'-O-methyluridine-3'-phosphate
  modified_base 18: mod_base = OTHER; note = 2'-O-methyladenosine-3'-phosphate
  modified_base 19: mod_base = OTHER; note = 2'-O-methylcytidine-3'-phosphate
  modified_base 20: mod_base = OTHER; note = 2'-O-methyluridine-3'-phosphate
  modified_base 21: mod_base = OTHER; note = 2'-O-methyluridine-3'-phosphate ((2S,4R)-1-[29-[[2-(acetylamino)-2-deoxy-beta-D-galactopyra nosyl]oxy]-14,14-bis[[3-[[3-[[5-[[2-(acetylamino)-2-deoxy-b eta-D-galactopyranosyl]oxy]-1-oxopentyl]amino]propyl]amino] -3-oxopropoxy]methyl]-1,12,19,25-tetraoxo-16-oxa-13,20,24-t riazanonacos-1-yl]-4-hydroxy-2-pyrrolidinyl)methyl ester
acattgaaatgagtactactt

SEQ ID NO: 879 - RNA, 21 nt, synthetic construct
  source 1..21: mol_type = other RNA
  modified_base 1: mod_base = OTHER; note = 2'-O-methylguanosine-3'-phosphorothioate
  modified_base 2: mod_base = OTHER; note = 2'-O-methyladenosine-3'-phosphorothioate
  modified_base 3: mod_base = OTHER; note = 2'-O-methylguanosine-3'-phosphate
  modified_base 4: mod_base = OTHER; note = 2'-O-methyluridine-3'-phosphate
  modified_base 5: mod_base = OTHER; note = 2'-O-methyladenosine-3'-phosphate
  modified_base 6: mod_base = OTHER; note = 2'-O-methylcytidine-3'-phosphate
  modified_base 7: mod_base = OTHER; note = 2'-deoxy-2'-fluorouridine-3'-phosphate
  modified_base 8: mod_base = OTHER; note = 2'-O-methyladenosine-3'-phosphate
  modified_base 9: mod_base = OTHER; note = 2'-deoxy-2'-fluorocytidine-3'-phosphate
  modified_base 10: mod_base = OTHER; note = 2'-deoxy-2'-fluorouridine-3'-phosphate
  modified_base 11: mod_base = OTHER; note = 2'-deoxy-2'-fluoroguanosine-3'-phosphate
  modified_base 12: mod_base = OTHER; note = 2'-O-methylguanosine-3'-phosphate
  modified_base 13: mod_base = OTHER; note = 2'-O-methylcytidine-3'-phosphate
  modified_base 14: mod_base = OTHER; note = 2'-O-methyluridine-3'-phosphate
  modified_base 15: mod_base = OTHER; note = 2'-O-methylguanosine-3'-phosphate
  modified_base 16: mod_base = OTHER; note = 2'-O-methylguanosine-3'-phosphate
  modified_base 17: mod_base = OTHER; note = 2'-O-methylguanosine-3'-phosphate
  modified_base 18: mod_base = OTHER; note = 2'-O-methyluridine-3'-phosphate
  modified_base 19: mod_base = OTHER; note = 2'-O-methyluridine-3'-phosphate
  modified_base 20: mod_base = OTHER; note = 2'-O-methylguanosine-3'-phosphate
  modified_base 21: mod_base = OTHER; note = 2'-O-methyluridine-3'-phosphate ((2S,4R)-1-[29-[[2-(acetylamino)-2-deoxy-beta-D-galactopyra nosyl]oxy]-14,14-bis[[3-[[3-[[5-[[2-(acetylamino)-2-deoxy-b eta-D-galactopyranosyl]oxy]-1-oxopentyl]amino]propyl]amino] -3-oxopropoxy]methyl]-1,12,19,25-tetraoxo-16-oxa-13,20,24-t riazanonacos-1-yl]-4-hydroxy-2-pyrrolidinyl)methyl ester
gagtactactggctgggttgt

SEQ ID NO: 880 - RNA, 21 nt, synthetic construct
  source 1..21: mol_type = other RNA
  modified_base 1: mod_base = OTHER; note = 2'-O-methyluridine-3'-phosphorothioate
  modified_base 2: mod_base = OTHER; note = 2'-O-methylguanosine-3'-phosphorothioate
  modified_base 3: mod_base = OTHER; note = 2'-O-methylguanosine-3'-phosphate
  modified_base 4: mod_base = OTHER; note = 2'-O-methylcytidine-3'-phosphate
  modified_base 5: mod_base = OTHER; note = 2'-O-methyluridine-3'-phosphate
  modified_base 6: mod_base = OTHER; note = 2'-O-methylguanosine-3'-phosphate
  modified_base 7: mod_base = OTHER; note = 2'-deoxy-2'-fluoroguanosine-3'-phosphate
  modified_base 8: mod_base = OTHER; note = 2'-O-methylguanosine-3'-phosphate
  modified_base 9: mod_base = OTHER; note = 2'-deoxy-2'-fluorouridine-3'-phosphate
  modified_base 10: mod_base = OTHER; note = 2'-deoxy-2'-fluorouridine-3'-phosphate
  modified_base 11: mod_base = OTHER; note = 2'-deoxy-2'-fluoroguanosine-3'-phosphate
  modified_base 12: mod_base = OTHER; note = 2'-O-methylguanosine-3'-phosphate
  modified_base 13: mod_base = OTHER; note = 2'-O-methyladenosine-3'-phosphate
  modified_base 14: mod_base = OTHER; note = 2'-O-methyladenosine-3'-phosphate
  modified_base 15: mod_base = OTHER; note = 2'-O-methylguanosine-3'-phosphate
  modified_base 16: mod_base = OTHER; note = 2'-O-methyladenosine-3'-phosphate
  modified_base 17: mod_base = OTHER; note = 2'-O-methyluridine-3'-phosphate
  modified_base 18: mod_base = OTHER; note = 2'-O-methyluridine-3'-phosphate
  modified_base 19: mod_base = OTHER; note = 2'-O-methyluridine-3'-phosphate
  modified_base 20: mod_base = OTHER; note = 2'-O-methyladenosine-3'-phosphate
  modified_base 21: mod_base = OTHER; note = 2'-O-methyluridine-3'-phosphate ((2S,4R)-1-[29-[[2-(acetylamino)-2-deoxy-beta-D-galactopyra nosyl]oxy]-14,14-bis[[3-[[3-[[5-[[2-(acetylamino)-2-deoxy-b eta-D-galactopyranosyl]oxy]-1-oxopentyl]amino]propyl]amino] -3-oxopropoxy]methyl]-1,12,19,25-tetraoxo-16-oxa-13,20,24-t riazanonacos-1-yl]-4-hydroxy-2-pyrrolidinyl)methyl ester
tggctgggttggaagatttat

SEQ ID NO: 881 - RNA, 21 nt, synthetic construct
  source 1..21: mol_type = other RNA
  modified_base 1: mod_base = OTHER; note = 2'-O-methylguanosine-3'-phosphorothioate
  modified_base 2: mod_base = OTHER; note = 2'-O-methylguanosine-3'-phosphorothioate
  modified_base 3: mod_base = OTHER; note = 2'-O-methyluridine-3'-phosphate
  modified_base 4: mod_base = OTHER; note = 2'-O-methyluridine-3'-phosphate
  modified_base 5: mod_base = OTHER; note = 2'-O-methylguanosine-3'-phosphate
  modified_base 6: mod_base = OTHER; note = 2'-O-methylguanosine-3'-phosphate
  modified_base 7: mod_base = OTHER; note = 2'-deoxy-2'-fluoroadenosine-3'-phosphate
  modified_base 8: mod_base = OTHER; note = 2'-O-methyladenosine-3'-phosphate
  modified_base 9: mod_base = OTHER; note = 2'-deoxy-2'-fluoroguanosine-3'-phosphate
  modified_base 10: mod_base = OTHER; note = 2'-deoxy-2'-fluoroadenosine-3'-phosphate
  modified_base 11: mod_base = OTHER; note = 2'-deoxy-2'-fluorouridine-3'-phosphate
  modified_base 12: mod_base = OTHER; note = 2'-O-methyluridine-3'-phosphate
  modified_base 13: mod_base = OTHER; note = 2'-O-methyluridine-3'-phosphate
  modified_base 14: mod_base = OTHER; note = 2'-O-methyladenosine-3'-phosphate
  modified_base 15: mod_base = OTHER; note = 2'-O-methylguanosine-3'-phosphate
  modified_base 16: mod_base = OTHER; note = 2'-O-methylguanosine-3'-phosphate
  modified_base 17: mod_base = OTHER; note = 2'-O-methylcytidine-3'-phosphate
  modified_base 18: mod_base = OTHER; note = 2'-O-methylcytidine-3'-phosphate
  modified_base 19: mod_base = OTHER; note = 2'-O-methyluridine-3'-phosphate
  modified_base 20: mod_base = OTHER; note = 2'-O-methyluridine-3'-phosphate
  modified_base 21: mod_base = OTHER; note = 2'-O-methyluridine-3'-phosphate ((2S,4R)-1-[29-[[2-(acetylamino)-2-deoxy-beta-D-galactopyra nosyl]oxy]-14,14-bis[[3-[[3-[[5-[[2-(acetylamino)-2-deoxy-b eta-D-galactopyranosyl]oxy]-1-oxopentyl]amino]propyl]amino] -3-oxopropoxy]methyl]-1,12,19,25-tetraoxo-16-oxa-13,20,24-t riazanonacos-1-yl]-4-hydroxy-2-pyrrolidinyl)methyl ester
ggttggaagatttaggccttt

SEQ ID NO: 882 - RNA, 21 nt, synthetic construct
  source 1..21: mol_type = other RNA
  modified_base 1: mod_base = OTHER; note = 2'-O-methylguanosine-3'-phosphorothioate
  modified_base 2: mod_base = OTHER; note = 2'-O-methyladenosine-3'-phosphorothioate
  modified_base 3: mod_base = OTHER; note = 2'-O-methyluridine-3'-phosphate
  modified_base 4: mod_base = OTHER; note = 2'-O-methyluridine-3'-phosphate
  modified_base 5: mod_base = OTHER; note = 2'-O-methyluridine-3'-phosphate
  modified_base 6: mod_base = OTHER; note = 2'-O-methyladenosine-3'-phosphate
  modified_base 7: mod_base = OTHER; note = 2'-deoxy-2'-fluoroguanosine-3'-phosphate
  modified_base 8: mod_base = OTHER; note = 2'-O-methylguanosine-3'-phosphate
  modified_base 9: mod_base = OTHER; note = 2'-deoxy-2'-fluorocytidine-3'-phosphate
  modified_base 10: mod_base = OTHER; note = 2'-deoxy-2'-fluorocytidine-3'-phosphate
  modified_base 11: mod_base = OTHER; note = 2'-deoxy-2'-fluorouridine-3'-phosphate
  modified_base 12: mod_base = OTHER; note = 2'-O-methyluridine-3'-phosphate
  modified_base 13: mod_base = OTHER; note = 2'-O-methylcytidine-3'-phosphate
  modified_base 14: mod_base = OTHER; note = 2'-O-methyladenosine-3'-phosphate
  modified_base 15: mod_base = OTHER; note = 2'-O-methylguanosine-3'-phosphate
  modified_base 16: mod_base = OTHER; note = 2'-O-methyladenosine-3'-phosphate
  modified_base 17: mod_base = OTHER; note = 2'-O-methyladenosine-3'-phosphate
  modified_base 18: mod_base = OTHER; note = 2'-O-methylcytidine-3'-phosphate
  modified_base 19: mod_base = OTHER; note = 2'-O-methylcytidine-3'-phosphate
  modified_base 20: mod_base = OTHER; note = 2'-O-methyluridine-3'-phosphate
  modified_base 21: mod_base = OTHER; note = 2'-O-methyluridine-3'-phosphate ((2S,4R)-1-[29-[[2-(acetylamino)-2-deoxy-beta-D-galactopyra nosyl]oxy]-14,14-bis[[3-[[3-[[5-[[2-(acetylamino)-2-deoxy-b eta-D-galactopyranosyl]oxy]-1-oxopentyl]amino]propyl]amino] -3-oxopropoxy]methyl]-1,12,19,25-tetraoxo-16-oxa-13,20,24-t riazanonacos-1-yl]-4-hydroxy-2-pyrrolidinyl)methyl ester
gatttaggccttcagaacctt

SEQ ID NO: 883 - RNA, 21 nt, synthetic construct
  source 1..21: mol_type = other RNA
  modified_base 1: mod_base = OTHER; note = 2'-O-methylcytidine-3'-phosphorothioate
  modified_base 2: mod_base = OTHER; note = 2'-O-methylcytidine-3'-phosphorothioate
  modified_base 3: mod_base = OTHER; note = 2'-O-methyluridine-3'-phosphate
  modified_base 4: mod_base = OTHER; note = 2'-O-methyluridine-3'-phosphate
  modified_base 5: mod_base = OTHER; note = 2'-O-methylcytidine-3'-phosphate
  modified_base 6: mod_base = OTHER; note = 2'-O-methyladenosine-3'-phosphate
  modified_base 7: mod_base = OTHER; note = 2'-deoxy-2'-fluoroguanosine-3'-phosphate
  modified_base 8: mod_base = OTHER; note = 2'-O-methyladenosine-3'-phosphate
  modified_base 9: mod_base = OTHER; note = 2'-deoxy-2'-fluoroadenosine-3'-phosphate
  modified_base 10: mod_base = OTHER; note = 2'-deoxy-2'-fluorocytidine-3'-phosphate
  modified_base 11: mod_base = OTHER; note = 2'-deoxy-2'-fluorocytidine-3'-phosphate
  modified_base 12: mod_base = OTHER; note = 2'-O-methyluridine-3'-phosphate
  modified_base 13: mod_base = OTHER; note = 2'-O-methylcytidine-3'-phosphate
  modified_base 14: mod_base = OTHER; note = 2'-O-methyladenosine-3'-phosphate
  modified_base 15: mod_base = OTHER; note = 2'-O-methyluridine-3'-phosphate
  modified_base 16: mod_base = OTHER; note = 2'-O-methyluridine-3'-phosphate
  modified_base 17: mod_base = OTHER; note = 2'-O-methyluridine-3'-phosphate
  modified_base 18: mod_base = OTHER; note = 2'-O-methyluridine-3'-phosphate
  modified_base 19: mod_base = OTHER; note = 2'-O-methyladenosine-3'-phosphate
  modified_base 20: mod_base = OTHER; note = 2'-O-methylcytidine-3'-phosphate
  modified_base 21: mod_base = OTHER; note = 2'-O-methyluridine-3'-phosphate ((2S,4R)-1-[29-[[2-(acetylamino)-2-deoxy-beta-D-galactopyra nosyl]oxy]-14,14-bis[[3-[[3-[[5-[[2-(acetylamino)-2-deoxy-b eta-D-galactopyranosyl]oxy]-1-oxopentyl]amino]propyl]amino] -3-oxopropoxy]methyl]-1,12,19,25-tetraoxo-16-oxa-13,20,24-t riazanonacos-1-yl]-4-hydroxy-2-pyrrolidinyl)methyl ester
ccttcagaacctcattttact

SEQ ID NO: 884 - RNA, 21 nt, synthetic construct
  source 1..21: mol_type = other RNA
  modified_base 1: mod_base = OTHER; note = 2'-O-methylguanosine-3'-phosphorothioate
  modified_base 2: mod_base = OTHER; note = 2'-O-methyladenosine-3'-phosphorothioate
  modified_base 3: mod_base = OTHER; note = 2'-O-methyladenosine-3'-phosphate
  modified_base 4: mod_base = OTHER; note = 2'-O-methylcytidine-3'-phosphate
  modified_base 5: mod_base = OTHER; note = 2'-O-methylcytidine-3'-phosphate
  modified_base 6: mod_base = OTHER; note = 2'-O-methyluridine-3'-phosphate
  modified_base 7: mod_base = OTHER; note = 2'-deoxy-2'-fluorocytidine-3'-phosphate
  modified_base 8: mod_base = OTHER; note = 2'-O-methyladenosine-3'-phosphate
  modified_base 9: mod_base = OTHER; note = 2'-deoxy-2'-fluorouridine-3'-phosphate
  modified_base 10: mod_base = OTHER; note = 2'-deoxy-2'-fluorouridine-3'-phosphate
  modified_base 11: mod_base = OTHER; note = 2'-deoxy-2'-fluorouridine-3'-phosphate
  modified_base 12: mod_base = OTHER; note = 2'-O-methyluridine-3'-phosphate
  modified_base 13: mod_base = OTHER; note = 2'-O-methyladenosine-3'-phosphate
  modified_base 14: mod_base = OTHER; note = 2'-O-methylcytidine-3'-phosphate
  modified_base 15: mod_base = OTHER; note = 2'-O-methylcytidine-3'-phosphate
  modified_base 16: mod_base = OTHER; note = 2'-O-methylcytidine-3'-phosphate
  modified_base 17: mod_base = OTHER; note = 2'-O-methyluridine-3'-phosphate
  modified_base 18: mod_base = OTHER; note = 2'-O-methyluridine-3'-phosphate
  modified_base 19: mod_base = OTHER; note = 2'-O-methylguanosine-3'-phosphate
  modified_base 20: mod_base = OTHER; note = 2'-O-methyladenosine-3'-phosphate
  modified_base 21: mod_base = OTHER; note = 2'-O-methyluridine-3'-phosphate ((2S,4R)-1-[29-[[2-(acetylamino)-2-deoxy-beta-D-galactopyra nosyl]oxy]-14,14-bis[[3-[[3-[[5-[[2-(acetylamino)-2-deoxy-b eta-D-galactopyranosyl]oxy]-1-oxopentyl]amino]propyl]amino] -3-oxopropoxy]methyl]-1,12,19,25-tetraoxo-16-oxa-13,20,24-t riazanonacos-1-yl]-4-hydroxy-2-pyrrolidinyl)methyl ester
gaacctcattttacccttgat

SEQ ID NO: 885 - RNA, 21 nt, synthetic construct
  source 1..21: mol_type = other RNA
  modified_base 1: mod_base = OTHER; note = 2'-O-methylcytidine-3'-phosphorothioate
  modified_base 2: mod_base = OTHER; note = 2'-O-methyladenosine-3'-phosphorothioate
  modified_base 3: mod_base = OTHER; note = 2'-O-methyluridine-3'-phosphate
  modified_base 4: mod_base = OTHER; note = 2'-O-methyluridine-3'-phosphate
  modified_base 5: mod_base = OTHER; note = 2'-O-methyluridine-3'-phosphate
  modified_base 6: mod_base = OTHER; note = 2'-O-methyluridine-3'-phosphate
  modified_base 7: mod_base = OTHER; note = 2'-deoxy-2'-fluoroadenosine-3'-phosphate
  modified_base 8: mod_base = OTHER; note = 2'-O-methylcytidine-3'-phosphate
  modified_base 9: mod_base = OTHER; note = 2'-deoxy-2'-fluorocytidine-3'-phosphate
  modified_base 10: mod_base = OTHER; note = 2'-deoxy-2'-fluorocytidine-3'-phosphate
  modified_base 11: mod_base = OTHER; note = 2'-deoxy-2'-fluorouridine-3'-phosphate
  modified_base 12: mod_base = OTHER; note = 2'-O-methyluridine-3'-phosphate
  modified_base 13: mod_base = OTHER; note = 2'-O-methylguanosine-3'-phosphate
  modified_base 14: mod_base = OTHER; note = 2'-O-methyladenosine-3'-phosphate
  modified_base 15: mod_base = OTHER; note = 2'-O-methyluridine-3'-phosphate
  modified_base 16: mod_base = OTHER; note = 2'-O-methylguanosine-3'-phosphate
  modified_base 17: mod_base = OTHER; note = 2'-O-methylguanosine-3'-phosphate
  modified_base 18: mod_base = OTHER; note = 2'-O-methyluridine-3'-phosphate
  modified_base 19: mod_base = OTHER; note = 2'-O-methyladenosine-3'-phosphate
  modified_base 20: mod_base = OTHER; note = 2'-O-methyladenosine-3'-phosphate
  modified_base 21: mod_base = OTHER; note = 2'-O-methyluridine-3'-phosphate ((2S,4R)-1-[29-[[2-(acetylamino)-2-deoxy-beta-D-galactopyra nosyl]oxy]-14,14-bis[[3-[[3-[[5-[[2-(acetylamino)-2-deoxy-b eta-D-galactopyranosyl]oxy]-1-oxopentyl]amino]propyl]amino] -3-oxopropoxy]methyl]-1,12,19,25-tetraoxo-16-oxa-13,20,24-t riazanonacos-1-yl]-4-hydroxy-2-pyrrolidinyl)methyl ester
cattttacccttgatggtaat

SEQ ID NO: 886 - RNA, 21 nt, synthetic construct
  source 1..21: mol_type = other RNA
  modified_base 1: mod_base = OTHER; note = 2'-O-methyladenosine-3'-phosphorothioate
  modified_base 2: mod_base = OTHER; note = 2'-O-methylcytidine-3'-phosphorothioate
  modified_base 3: mod_base = OTHER; note = 2'-O-methylcytidine-3'-phosphate
  modified_base 4: mod_base = OTHER; note = 2'-O-methylcytidine-3'-phosphate
  modified_base 5: mod_base = OTHER; note = 2'-O-methyluridine-3'-phosphate
  modified_base 6: mod_base = OTHER; note = 2'-O-methyluridine-3'-phosphate
  modified_base 7: mod_base = OTHER; note = 2'-deoxy-2'-fluoroguanosine-3'-phosphate
  modified_base 8: mod_base = OTHER; note = 2'-O-methyladenosine-3'-phosphate
  modified_base 9: mod_base = OTHER; note = 2'-deoxy-2'-fluorouridine-3'-phosphate
  modified_base 10: mod_base = OTHER; note = 2'-deoxy-2'-fluoroguanosine-3'-phosphate
  modified_base 11: mod_base = OTHER; note = 2'-deoxy-2'-fluoroguanosine-3'-phosphate
  modified_base 12: mod_base = OTHER; note = 2'-O-methyluridine-3'-phosphate
  modified_base 13: mod_base = OTHER; note = 2'-O-methyladenosine-3'-phosphate
  modified_base 14: mod_base = OTHER; note = 2'-O-methyladenosine-3'-phosphate
  modified_base 15: mod_base = OTHER; note = 2'-O-methyluridine-3'-phosphate
  modified_base 16: mod_base = OTHER; note = 2'-O-methyladenosine-3'-phosphate
  modified_base 17: mod_base = OTHER; note = 2'-O-methylguanosine-3'-phosphate
  modified_base 18: mod_base = OTHER; note = 2'-O-methylcytidine-3'-phosphate
  modified_base 19: mod_base = OTHER; note = 2'-O-methyluridine-3'-phosphate
  modified_base 20: mod_base = OTHER; note = 2'-O-methyluridine-3'-phosphate
  modified_base 21: mod_base = OTHER; note = 2'-O-methyluridine-3'-phosphate ((2S,4R)-1-[29-[[2-(acetylamino)-2-deoxy-beta-D-galactopyra nosyl]oxy]-14,14-bis[[3-[[3-[[5-[[2-(acetylamino)-2-deoxy-b eta-D-galactopyranosyl]oxy]-1-oxopentyl]amino]propyl]amino] -3-oxopropoxy]methyl]-1,12,19,25-tetraoxo-16-oxa-13,20,24-t riazanonacos-1-yl]-4-hydroxy-2-pyrrolidinyl)methyl ester
acccttgatggtaatagcttt

SEQ ID NO: 887 - RNA, 21 nt, synthetic construct
  source 1..21: mol_type = other RNA
  modified_base 1: mod_base = OTHER; note = 2'-O-methyladenosine-3'-phosphorothioate
  modified_base 2: mod_base = OTHER; note = 2'-O-methyluridine-3'-phosphorothioate
  modified_base 3: mod_base = OTHER; note = 2'-O-methylguanosine-3'-phosphate
  modified_base 4: mod_base = OTHER; note = 2'-O-methylguanosine-3'-phosphate
  modified_base 5: mod_base = OTHER; note = 2'-O-methyluridine-3'-phosphate
  modified_base 6: mod_base = OTHER; note = 2'-O-methyladenosine-3'-phosphate
  modified_base 7: mod_base = OTHER; note = 2'-deoxy-2'-fluoroadenosine-3'-phosphate
  modified_base 8: mod_base = OTHER; note = 2'-O-methyluridine-3'-phosphate
  modified_base 9: mod_base = OTHER; note = 2'-deoxy-2'-fluoroadenosine-3'-phosphate
  modified_base 10: mod_base = OTHER; note = 2'-deoxy-2'-fluoroguanosine-3'-phosphate
  modified_base 11: mod_base = OTHER; note = 2'-deoxy-2'-fluorocytidine-3'-phosphate
  modified_base 12: mod_base = OTHER; note = 2'-O-methyluridine-3'-phosphate
  modified_base 13: mod_base = OTHER; note = 2'-O-methyluridine-3'-phosphate
  modified_base 14: mod_base = OTHER; note = 2'-O-methylcytidine-3'-phosphate
  modified_base 15: mod_base = OTHER; note = 2'-O-methyluridine-3'-phosphate
  modified_base 16: mod_base = OTHER; note = 2'-O-methyladenosine-3'-phosphate
  modified_base 17: mod_base = OTHER; note = 2'-O-methylcytidine-3'-phosphate
  modified_base 18: mod_base = OTHER; note = 2'-O-methyladenosine-3'-phosphate
  modified_base 19: mod_base = OTHER; note = 2'-O-methyladenosine-3'-phosphate
  modified_base 20: mod_base = OTHER; note = 2'-O-methylguanosine-3'-phosphate
  modified_base 21: mod_base = OTHER; note = 2'-O-methyluridine-3'-phosphate ((2S,4R)-1-[29-[[2-(acetylamino)-2-deoxy-beta-D-galactopyra nosyl]oxy]-14,14-bis[[3-[[3-[[5-[[2-(acetylamino)-2-deoxy-b eta-D-galactopyranosyl]oxy]-1-oxopentyl]amino]propyl]amino] -3-oxopropoxy]methyl]-1,12,19,25-tetraoxo-16-oxa-13,20,24-t riazanonacos-1-yl]-4-hydroxy-2-pyrrolidinyl)methyl ester
atggtaatagcttctacaagt

SEQ ID NO: 888 - RNA, 21 nt, synthetic construct
  source 1..21: mol_type = other RNA
  modified_base 1: mod_base = OTHER; note = 2'-O-methyluridine-3'-phosphorothioate
  modified_base 2: mod_base = OTHER; note = 2'-O-methyladenosine-3'-phosphorothioate
  modified_base 3: mod_base = OTHER; note = 2'-O-methylguanosine-3'-phosphate
  modified_base 4: mod_base = OTHER; note = 2'-O-methylcytidine-3'-phosphate
  modified_base 5: mod_base = OTHER; note = 2'-O-methyluridine-3'-phosphate
  modified_base 6: mod_base = OTHER; note = 2'-O-methyluridine-3'-phosphate
  modified_base 7: mod_base = OTHER; note = 2'-deoxy-2'-fluorocytidine-3'-phosphate
  modified_base 8: mod_base = OTHER; note = 2'-O-methyluridine-3'-phosphate
  modified_base 9: mod_base = OTHER; note = 2'-deoxy-2'-fluoroadenosine-3'-phosphate
  modified_base 10: mod_base = OTHER; note = 2'-deoxy-2'-fluorocytidine-3'-phosphate
  modified_base 11: mod_base = OTHER; note = 2'-deoxy-2'-fluoroadenosine-3'-phosphate
  modified_base 12: mod_base = OTHER; note = 2'-O-methyladenosine-3'-phosphate
  modified_base 13: mod_base = OTHER; note = 2'-O-methylguanosine-3'-phosphate
  modified_base 14: mod_base = OTHER; note = 2'-O-methyladenosine-3'-phosphate
  modified_base 15: mod_base = OTHER; note = 2'-O-methyluridine-3'-phosphate
  modified_base 16: mod_base = OTHER; note = 2'-O-methylcytidine-3'-phosphate
  modified_base 17: mod_base = OTHER; note = 2'-O-methyladenosine-3'-phosphate
  modified_base 18: mod_base = OTHER; note = 2'-O-methyluridine-3'-phosphate
  modified_base 19: mod_base = OTHER; note = 2'-O-methylcytidine-3'-phosphate
  modified_base 20: mod_base = OTHER; note = 2'-O-methyladenosine-3'-phosphate
  modified_base 21: mod_base = OTHER; note = 2'-O-methyluridine-3'-phosphate ((2S,4R)-1-[29-[[2-(acetylamino)-2-deoxy-beta-D-galactopyra nosyl]oxy]-14,14-bis[[3-[[3-[[5-[[2-(acetylamino)-2-deoxy-b eta-D-galactopyranosyl]oxy]-1-oxopentyl]amino]propyl]amino] -3-oxopropoxy]methyl]-1,12,19,25-tetraoxo-16-oxa-13,20,24-t riazanonacos-1-yl]-4-hydroxy-2-pyrrolidinyl)methyl ester
tagcttctacaagatcatcat

SEQ ID NO: 889 - RNA, 21 nt, synthetic construct
  source 1..21: mol_type = other RNA
  modified_base 1: mod_base = OTHER; note = 2'-O-methylcytidine-3'-phosphorothioate
  modified_base 2: mod_base = OTHER; note = 2'-O-methyladenosine-3'-phosphorothioate
  modified_base 3: mod_base = OTHER; note = 2'-O-methyladenosine-3'-phosphate
  modified_base 4: mod_base = OTHER; note = 2'-O-methylguanosine-3'-phosphate
  modified_base 5: mod_base = OTHER; note = 2'-O-methyladenosine-3'-phosphate
  modified_base 6: mod_base = OTHER; note = 2'-O-methyluridine-3'-phosphate
  modified_base 7: mod_base = OTHER; note = 2'-deoxy-2'-fluorocytidine-3'-phosphate
  modified_base 8: mod_base = OTHER; note = 2'-O-methyladenosine-3'-phosphate
  modified_base 9: mod_base = OTHER; note = 2'-deoxy-2'-fluorouridine-3'-phosphate
  modified_base 10: mod_base = OTHER; note = 2'-deoxy-2'-fluorocytidine-3'-phosphate
  modified_base 11: mod_base = OTHER; note = 2'-deoxy-2'-fluoroadenosine-3'-phosphate
  modified_base 12: mod_base = OTHER; note = 2'-O-methylguanosine-3'-phosphate
  modified_base 13: mod_base = OTHER; note = 2'-O-methylcytidine-3'-phosphate
  modified_base 14: mod_base = OTHER; note = 2'-O-methyladenosine-3'-phosphate
  modified_base 15: mod_base = OTHER; note = 2'-O-methyladenosine-3'-phosphate
  modified_base 16: mod_base = OTHER; note = 2'-O-methyluridine-3'-phosphate
  modified_base 17: mod_base = OTHER; note = 2'-O-methylguanosine-3'-phosphate
  modified_base 18: mod_base = OTHER; note = 2'-O-methyladenosine-3'-phosphate
  modified_base 19: mod_base = OTHER; note = 2'-O-methyladenosine-3'-phosphate
  modified_base 20: mod_base = OTHER; note = 2'-O-methylguanosine-3'-phosphate
  modified_base 21: mod_base = OTHER; note = 2'-O-methyluridine-3'-phosphate ((2S,4R)-1-[29-[[2-(acetylamino)-2-deoxy-beta-D-galactopyra nosyl]oxy]-14,14-bis[[3-[[3-[[5-[[2-(acetylamino)-2-deoxy-b eta-D-galactopyranosyl]oxy]-1-oxopentyl]amino]propyl]amino] -3-oxopropoxy]methyl]-1,12,19,25-tetraoxo-16-oxa-13,20,24-t riazanonacos-1-yl]-4-hydroxy-2-pyrrolidinyl)methyl ester
caagatcatcagcaatgaagt

SEQ ID NO: 890 - RNA, 21 nt, synthetic construct
  source 1..21: mol_type = other RNA
  modified_base 1: mod_base = OTHER; note = 2'-O-methyladenosine-3'-phosphorothioate
  modified_base 2: mod_base = OTHER; note = 2'-O-methylguanosine-3'-phosphorothioate
  modified_base 3: mod_base = OTHER; note = 2'-O-methylcytidine-3'-phosphate
  modified_base 4: mod_base = OTHER; note = 2'-O-methyladenosine-3'-phosphate
  modified_base 5: mod_base = OTHER; note = 2'-O-methyladenosine-3'-phosphate
  modified_base 6: mod_base = OTHER; note = 2'-O-methyluridine-3'-phosphate
  modified_base 7: mod_base = OTHER; note = 2'-deoxy-2'-fluoroguanosine-3'-phosphate
  modified_base 8: mod_base = OTHER; note = 2'-O-methyladenosine-3'-phosphate
  modified_base 9: mod_base = OTHER; note = 2'-deoxy-2'-fluoroadenosine-3'-phosphate
  modified_base 10: mod_base = OTHER; note = 2'-deoxy-2'-fluoroguanosine-3'-phosphate
  modified_base 11: mod_base = OTHER; note = 2'-deoxy-2'-fluoroadenosine-3'-phosphate
  modified_base 12: mod_base = OTHER; note = 2'-O-methyladenosine-3'-phosphate
  modified_base 13: mod_base = OTHER; note = 2'-O-methylguanosine-3'-phosphate
  modified_base 14: mod_base = OTHER; note = 2'-O-methylguanosine-3'-phosphate
  modified_base 15: mod_base = OTHER; note = 2'-O-methyluridine-3'-phosphate
  modified_base 16: mod_base = OTHER; note = 2'-O-methyluridine-3'-phosphate
  modified_base 17: mod_base = OTHER; note = 2'-O-methyladenosine-3'-phosphate
  modified_base 18: mod_base = OTHER; note = 2'-O-methylcytidine-3'-phosphate
  modified_base 19: mod_base = OTHER; note = 2'-O-methyladenosine-3'-phosphate
  modified_base 20: mod_base = OTHER; note = 2'-O-methylguanosine-3'-phosphate
  modified_base 21: mod_base = OTHER; note = 2'-O-methyluridine-3'-phosphate ((2S,4R)-1-[29-[[2-(acetylamino)-2-deoxy-beta-D-galactopyra nosyl]oxy]-14,14-bis[[3-[[3-[[5-[[2-(acetylamino)-2-deoxy-b eta-D-galactopyranosyl]oxy]-1-oxopentyl]amino]propyl]amino] -3-oxopropoxy]methyl]-1,12,19,25-tetraoxo-16-oxa-13,20,24-t riazanonacos-1-yl]-4-hydroxy-2-pyrrolidinyl)methyl ester
agcaatgaagaaggttacagt

SEQ ID NO: 891 - RNA, 21 nt, synthetic construct
  source 1..21: mol_type = other RNA
  modified_base 1: mod_base = OTHER; note = 2'-O-methylguanosine-3'-phosphorothioate
  modified_base 2: mod_base = OTHER; note = 2'-O-methyladenosine-3'-phosphorothioate
  modified_base 3: mod_base = OTHER; note = 2'-O-methyladenosine-3'-phosphate
  modified_base 4: mod_base = OTHER; note = 2'-O-methylguanosine-3'-phosphate
  modified_base 5: mod_base = OTHER; note = 2'-O-methylguanosine-3'-phosphate
  modified_base 6: mod_base = OTHER; note = 2'-O-methyluridine-3'-phosphate
  modified_base 7: mod_base = OTHER; note = 2'-deoxy-2'-fluorouridine-3'-phosphate
  modified_base 8: mod_base = OTHER; note = 2'-O-methyladenosine-3'-phosphate
  modified_base 9: mod_base = OTHER; note = 2'-deoxy-2'-fluorocytidine-3'-phosphate
  modified_base 10: mod_base = OTHER; note = 2'-deoxy-2'-fluoroadenosine-3'-phosphate
  modified_base 11: mod_base = OTHER; note = 2'-deoxy-2'-fluoroguanosine-3'-phosphate
  modified_base 12: mod_base = OTHER; note = 2'-O-methyladenosine-3'-phosphate
  modified_base 13: mod_base = OTHER; note = 2'-O-methylcytidine-3'-phosphate
  modified_base 14: mod_base = OTHER; note = 2'-O-methyladenosine-3'-phosphate
  modified_base 15: mod_base = OTHER; note = 2'-O-methylcytidine-3'-phosphate
  modified_base 16: mod_base = OTHER; note = 2'-O-methyladenosine-3'-phosphate
  modified_base 17: mod_base = OTHER; note = 2'-O-methyluridine-3'-phosphate
  modified_base 18: mod_base = OTHER; note = 2'-O-methyluridine-3'-phosphate
  modified_base 19: mod_base = OTHER; note = 2'-O-methyluridine-3'-phosphate
  modified_base 20: mod_base = OTHER; note = 2'-O-methylguanosine-3'-phosphate
  modified_base 21: mod_base = OTHER; note = 2'-O-methyluridine-3'-phosphate ((2S,4R)-1-[29-[[2-(acetylamino)-2-deoxy-beta-D-galactopyra nosyl]oxy]-14,14-bis[[3-[[3-[[5-[[2-(acetylamino)-2-deoxy-b eta-D-galactopyranosyl]oxy]-1-oxopentyl]amino]propyl]amino] -3-oxopropoxy]methyl]-1,12,19,25-tetraoxo-16-oxa-13,20,24-t riazanonacos-1-yl]-4-hydroxy-2-pyrrolidinyl)methyl ester
gaaggttacagacacatttgt

SEQ ID NO: 892 - RNA, 21 nt, synthetic construct
  source 1..21: mol_type = other RNA
  modified_base 1: mod_base = OTHER; note = 2'-O-methyladenosine-3'-phosphorothioate
  modified_base 2: mod_base = OTHER; note = 2'-O-methylcytidine-3'-phosphorothioate
  modified_base 3: mod_base = OTHER; note = 2'-O-methyladenosine-3'-phosphate
  modified_base 4: mod_base = OTHER; note = 2'-O-methylguanosine-3'-phosphate
  modified_base 5: mod_base = OTHER; note = 2'-O-methyladenosine-3'-phosphate
  modified_base 6: mod_base = OTHER; note = 2'-O-methylcytidine-3'-phosphate
  modified_base 7: mod_base = OTHER; note = 2'-deoxy-2'-fluoroadenosine-3'-phosphate
  modified_base 8: mod_base = OTHER; note = 2'-O-methylcytidine-3'-phosphate
  modified_base 9: mod_base = OTHER; note = 2'-deoxy-2'-fluoroadenosine-3'-phosphate
  modified_base 10: mod_base = OTHER; note = 2'-deoxy-2'-fluorouridine-3'-phosphate
  modified_base 11: mod_base = OTHER; note = 2'-deoxy-2'-fluorouridine-3'-phosphate
  modified_base 12: mod_base = OTHER; note = 2'-O-methyluridine-3'-phosphate
  modified_base 13: mod_base = OTHER; note = 2'-O-methylguanosine-3'-phosphate
  modified_base 14: mod_base = OTHER; note = 2'-O-methylcytidine-3'-phosphate
  modified_base 15: mod_base = OTHER; note = 2'-O-methyluridine-3'-phosphate
  modified_base 16: mod_base = OTHER; note = 2'-O-methyladenosine-3'-phosphate
  modified_base 17: mod_base = OTHER; note = 2'-O-methyluridine-3'-phosphate
  modified_base 18: mod_base = OTHER; note = 2'-O-methyluridine-3'-phosphate
  modified_base 19: mod_base = OTHER; note = 2'-O-methyluridine-3'-phosphate
  modified_base 20: mod_base = OTHER; note = 2'-O-methylcytidine-3'-phosphate
  modified_base 21: mod_base = OTHER; note = 2'-O-methyluridine-3'-phosphate ((2S,4R)-1-[29-[[2-(acetylamino)-2-deoxy-beta-D-galactopyra nosyl]oxy]-14,14-bis[[3-[[3-[[5-[[2-(acetylamino)-2-deoxy-b eta-D-galactopyranosyl]oxy]-1-oxopentyl]amino]propyl]amino] -3-oxopropoxy]methyl]-1,12,19,25-tetraoxo-16-oxa-13,20,24-t riazanonacos-1-yl]-4-hydroxy-2-pyrrolidinyl)methyl ester
acagacacatttgctatttct

SEQ ID NO: 893 - RNA, 21 nt, synthetic construct
  source 1..21: mol_type = other RNA
  modified_base 1: mod_base = OTHER; note = 2'-O-methylcytidine-3'-phosphorothioate
  modified_base 2: mod_base = OTHER; note = 2'-O-methyladenosine-3'-phosphorothioate
  modified_base 3: mod_base = OTHER; note = 2'-O-methyluridine-3'-phosphate
  modified_base 4: mod_base = OTHER; note = 2'-O-methyluridine-3'-phosphate
  modified_base 5: mod_base = OTHER; note = 2'-O-methyluridine-3'-phosphate
  modified_base 6: mod_base = OTHER; note = 2'-O-methylguanosine-3'-phosphate
  modified_base 7: mod_base = OTHER; note = 2'-deoxy-2'-fluorocytidine-3'-phosphate
  modified_base 8: mod_base = OTHER; note = 2'-O-methyluridine-3'-phosphate
  modified_base 9: mod_base = OTHER; note = 2'-deoxy-2'-fluoroadenosine-3'-phosphate
  modified_base 10: mod_base = OTHER; note = 2'-deoxy-2'-fluorouridine-3'-phosphate
  modified_base 11: mod_base = OTHER; note = 2'-deoxy-2'-fluorouridine-3'-phosphate
  modified_base 12: mod_base = OTHER; note = 2'-O-methyluridine-3'-phosphate
  modified_base 13: mod_base = OTHER; note = 2'-O-methylcytidine-3'-phosphate
  modified_base 14: mod_base = OTHER; note = 2'-O-methylcytidine-3'-phosphate
  modified_base 15: mod_base = OTHER; note = 2'-O-methyladenosine-3'-phosphate
  modified_base 16: mod_base = OTHER; note = 2'-O-methyladenosine-3'-phosphate
  modified_base 17: mod_base = OTHER; note = 2'-O-methyladenosine-3'-phosphate
  modified_base 18: mod_base = OTHER; note = 2'-O-methyluridine-3'-phosphate
  modified_base 19: mod_base = OTHER; note = 2'-O-methyladenosine-3'-phosphate
  modified_base 20: mod_base = OTHER; note = 2'-O-methylguanosine-3'-phosphate
  modified_base 21: mod_base = OTHER; note = 2'-O-methyluridine-3'-phosphate ((2S,4R)-1-[29-[[2-(acetylamino)-2-deoxy-beta-D-galactopyra nosyl]oxy]-14,14-bis[[3-[[3-[[5-[[2-(acetylamino)-2-deoxy-b eta-D-galactopyranosyl]oxy]-1-oxopentyl]amino]propyl]amino] -3-oxopropoxy]methyl]-1,12,19,25-tetraoxo-16-oxa-13,20,24-t riazanonacos-1-yl]-4-hydroxy-2-pyrrolidinyl)methyl ester
catttgctatttccaaatagt

SEQ ID NO: 894 - RNA, 21 nt, synthetic construct
  source 1..21: mol_type = other RNA
  modified_base 1: mod_base = OTHER; note = 2'-O-methylguanosine-3'-phosphorothioate
  modified_base 2: mod_base = OTHER; note = 2'-O-methyladenosine-3'-phosphorothioate
  modified_base 3: mod_base = OTHER; note = 2'-O-methylcytidine-3'-phosphate
  modified_base 4: mod_base = OTHER; note = 2'-O-methyluridine-3'-phosphate
  modified_base 5: mod_base = OTHER; note = 2'-O-methylguanosine-3'-phosphate
  modified_base 6: mod_base = OTHER; note = 2'-O-methylcytidine-3'-phosphate
  modified_base 7: mod_base = OTHER; note = 2'-deoxy-2'-fluoroadenosine-3'-phosphate
  modified_base 8: mod_base = OTHER; note = 2'-O-methylcytidine-3'-phosphate
  modified_base 9: mod_base = OTHER; note = 2'-deoxy-2'-fluoroadenosine-3'-phosphate
  modified_base 10: mod_base = OTHER; note = 2'-deoxy-2'-fluorouridine-3'-phosphate
  modified_base 11: mod_base = OTHER; note = 2'-deoxy-2'-fluorouridine-3'-phosphate
  modified_base 12: mod_base = OTHER; note = 2'-O-methyluridine-3'-phosphate
  modified_base 13: mod_base = OTHER; note = 2'-O-methyladenosine-3'-phosphate
  modified_base 14: mod_base = OTHER; note = 2'-O-methyluridine-3'-phosphate
  modified_base 15: mod_base = OTHER; note = 2'-O-methyluridine-3'-phosphate
  modified_base 16: mod_base = OTHER; note = 2'-O-methyladenosine-3'-phosphate
  modified_base 17: mod_base = OTHER; note = 2'-O-methylcytidine-3'-phosphate
  modified_base 18: mod_base = OTHER; note = 2'-O-methyladenosine-3'-phosphate
  modified_base 19: mod_base = OTHER; note = 2'-O-methyladenosine-3'-phosphate
  modified_base 20: mod_base = OTHER; note = 2'-O-methyladenosine-3'-phosphate
  modified_base 21: mod_base = OTHER; note = 2'-O-methyluridine-3'-phosphate ((2S,4R)-1-[29-[[2-(acetylamino)-2-deoxy-beta-D-galactopyra nosyl]oxy]-14,14-bis[[3-[[3-[[5-[[2-(acetylamino)-2-deoxy-b eta-D-galactopyranosyl]oxy]-1-oxopentyl]amino]propyl]amino] -3-oxopropoxy]methyl]-1,12,19,25-tetraoxo-16-oxa-13,20,24-t riazanonacos-1-yl]-4-hydroxy-2-pyrrolidinyl)methyl ester
gactgcacatttattacaaat

SEQ ID NO: 895 - RNA, 21 nt, synthetic construct
  source 1..21: mol_type = other RNA
  modified_base 1: mod_base = OTHER; note = 2'-O-methyladenosine-3'-phosphorothioate
  modified_base 2: mod_base = OTHER; note = 2'-O-methylcytidine-3'-phosphorothioate
  modified_base 3: mod_base = OTHER; note = 2'-O-methyladenosine-3'-phosphate
  modified_base 4: mod_base = OTHER; note = 2'-O-methyluridine-3'-phosphate
  modified_base 5: mod_base = OTHER; note = 2'-O-methyluridine-3'-phosphate
  modified_base 6: mod_base = OTHER; note = 2'-O-methyluridine-3'-phosphate
  modified_base 7: mod_base = OTHER; note = 2'-deoxy-2'-fluoroadenosine-3'-phosphate
  modified_base 8: mod_base = OTHER; note = 2'-O-methyluridine-3'-phosphate
  modified_base 9: mod_base = OTHER; note = 2'-deoxy-2'-fluorouridine-3'-phosphate
  modified_base 10: mod_base = OTHER; note = 2'-deoxy-2'-fluoroadenosine-3'-phosphate
  modified_base 11: mod_base = OTHER; note = 2'-deoxy-2'-fluorocytidine-3'-phosphate
  modified_base 12: mod_base = OTHER; note = 2'-O-methyladenosine-3'-phosphate
  modified_base 13: mod_base = OTHER; note = 2'-O-methyladenosine-3'-phosphate
  modified_base 14: mod_base = OTHER; note = 2'-O-methyladenosine-3'-phosphate
  modified_base 15: mod_base = OTHER; note = 2'-O-methyladenosine-3'-phosphate
  modified_base 16: mod_base = OTHER; note = 2'-O-methylguanosine-3'-phosphate
  modified_base 17: mod_base = OTHER; note = 2'-O-methylguanosine-3'-phosphate
  modified_base 18: mod_base = OTHER; note = 2'-O-methylcytidine-3'-phosphate
  modified_base 19: mod_base = OTHER; note = 2'-O-methyladenosine-3'-phosphate
  modified_base 20: mod_base = OTHER; note = 2'-O-methylcytidine-3'-phosphate
  modified_base 21: mod_base = OTHER; note = 2'-O-methyluridine-3'-phosphate ((2S,4R)-1-[29-[[2-(acetylamino)-2-deoxy-beta-D-galactopyra nosyl]oxy]-14,14-bis[[3-[[3-[[5-[[2-(acetylamino)-2-deoxy-b eta-D-galactopyranosyl]oxy]-1-oxopentyl]amino]propyl]amino] -3-oxopropoxy]methyl]-1,12,19,25-tetraoxo-16-oxa-13,20,24-t riazanonacos-1-yl]-4-hydroxy-2-pyrrolidinyl)methyl ester
acatttattacaaaaggcact

SEQ ID NO: 896 - RNA, 21 nt, synthetic construct
  source 1..21: mol_type = other RNA
  modified_base 1: mod_base = OTHER; note = 2'-O-methyluridine-3'-phosphorothioate
  modified_base 2: mod_base = OTHER; note = 2'-O-methyluridine-3'-phosphorothioate
  modified_base 3: mod_base = OTHER; note = 2'-O-methyladenosine-3'-phosphate
  modified_base 4: mod_base = OTHER; note = 2'-O-methylcytidine-3'-phosphate
  modified_base 5: mod_base = OTHER; note = 2'-O-methyladenosine-3'-phosphate
  modified_base 6: mod_base = OTHER; note = 2'-O-methyladenosine-3'-phosphate
  modified_base 7: mod_base = OTHER; note = 2'-deoxy-2'-fluoroadenosine-3'-phosphate
  modified_base 8: mod_base = OTHER; note = 2'-O-methyladenosine-3'-phosphate
  modified_base 9: mod_base = OTHER; note = 2'-deoxy-2'-fluoroguanosine-3'-phosphate
  modified_base 10: mod_base = OTHER; note = 2'-deoxy-2'-fluoroguanosine-3'-phosphate
  modified_base 11: mod_base = OTHER; note = 2'-deoxy-2'-fluorocytidine-3'-phosphate
  modified_base 12: mod_base = OTHER; note = 2'-O-methyladenosine-3'-phosphate
  modified_base 13: mod_base = OTHER; note = 2'-O-methylcytidine-3'-phosphate
  modified_base 14: mod_base = OTHER; note = 2'-O-methylcytidine-3'-phosphate
  modified_base 15: mod_base = OTHER; note = 2'-O-methyluridine-3'-phosphate
  modified_base 16: mod_base = OTHER; note = 2'-O-methylguanosine-3'-phosphate
  modified_base 17: mod_base = OTHER; note = 2'-O-methylguanosine-3'-phosphate
  modified_base 18: mod_base = OTHER; note = 2'-O-methylguanosine-3'-phosphate
  modified_base 19: mod_base = OTHER; note = 2'-O-methyladenosine-3'-phosphate
  modified_base 20: mod_base = OTHER; note = 2'-O-methyladenosine-3'-phosphate
  modified_base 21: mod_base = OTHER; note = 2'-O-methyluridine-3'-phosphate ((2S,4R)-1-[29-[[2-(acetylamino)-2-deoxy-beta-D-galactopyra nosyl]oxy]-14,14-bis[[3-[[3-[[5-[[2-(acetylamino)-2-deoxy-b eta-D-galactopyranosyl]oxy]-1-oxopentyl]amino]propyl]amino] -3-oxopropoxy]methyl]-1,12,19,25-tetraoxo-16-oxa-13,20,24-t riazanonacos-1-yl]-4-hydroxy-2-pyrrolidinyl)methyl ester
ttacaaaaggcacctgggaat

SEQ ID NO: 897 - RNA, 21 nt, synthetic construct
  source 1..21: mol_type = other RNA
  modified_base 1: mod_base = OTHER; note = 2'-O-methylguanosine-3'-phosphorothioate
  modified_base 2: mod_base = OTHER; note = 2'-O-methylguanosine-3'-phosphorothioate
  modified_base 3: mod_base = OTHER; note = 2'-O-methylcytidine-3'-phosphate
  modified_base 4: mod_base = OTHER; note = 2'-O-methyladenosine-3'-phosphate
  modified_base 5: mod_base = OTHER; note = 2'-O-methylcytidine-3'-phosphate
  modified_base 6: mod_base = OTHER; note = 2'-O-methylcytidine-3'-phosphate
  modified_base 7: mod_base = OTHER; note = 2'-deoxy-2'-fluorouridine-3'-phosphate
  modified_base 8: mod_base = OTHER; note = 2'-O-methylguanosine-3'-phosphate
  modified_base 9: mod_base = OTHER; note = 2'-deoxy-2'-fluoroguanosine-3'-phosphate
  modified_base 10: mod_base = OTHER; note = 2'-deoxy-2'-fluoroguanosine-3'-phosphate
  modified_base 11: mod_base = OTHER; note = 2'-deoxy-2'-fluoroadenosine-3'-phosphate
  modified_base 12: mod_base = OTHER; note = 2'-O-methyladenosine-3'-phosphate
  modified_base 13: mod_base = OTHER; note = 2'-O-methylguanosine-3'-phosphate
  modified_base 14: mod_base = OTHER; note = 2'-O-methyluridine-3'-phosphate
  modified_base 15: mod_base = OTHER; note = 2'-O-methylcytidine-3'-phosphate
  modified_base 16: mod_base = OTHER; note = 2'-O-methyladenosine-3'-phosphate
  modified_base 17: mod_base = OTHER; note = 2'-O-methyluridine-3'-phosphate
  modified_base 18: mod_base = OTHER; note = 2'-O-methylcytidine-3'-phosphate
  modified_base 19: mod_base = OTHER; note = 2'-O-methylguanosine-3'-phosphate
  modified_base 20: mod_base = OTHER; note = 2'-O-methylguanosine-3'-phosphate
  modified_base 21: mod_base = OTHER; note = 2'-O-methyluridine-3'-phosphate ((2S,4R)-1-[29-[[2-(acetylamino)-2-deoxy-beta-D-galactopyra nosyl]oxy]-14,14-bis[[3-[[3-[[5-[[2-(acetylamino)-2-deoxy-b eta-D-galactopyranosyl]oxy]-1-oxopentyl]amino]propyl]amino] -3-oxopropoxy]methyl]-1,12,19,25-tetraoxo-16-oxa-13,20,24-t riazanonacos-1-yl]-4-hydroxy-2-pyrrolidinyl)methyl ester
ggcacctgggaagtcatcggt

SEQ ID NO: 898 - RNA, 21 nt, synthetic construct
  source 1..21: mol_type = other RNA
  modified_base 1: mod_base = OTHER; note = 2'-O-methyluridine-3'-phosphorothioate
  modified_base 2: mod_base = OTHER; note = 2'-O-methylguanosine-3'-phosphorothioate
  modified_base 3: mod_base = OTHER; note = 2'-O-methylguanosine-3'-phosphate
  modified_base 4: mod_base = OTHER; note = 2'-O-methylguanosine-3'-phosphate
  modified_base 5: mod_base = OTHER; note = 2'-O-methyladenosine-3'-phosphate
  modified_base 6: mod_base = OTHER; note = 2'-O-methyladenosine-3'-phosphate
  modified_base 7: mod_base = OTHER; note = 2'-deoxy-2'-fluoroguanosine-3'-phosphate
  modified_base 8: mod_base = OTHER; note = 2'-O-methyluridine-3'-phosphate
  modified_base 9: mod_base = OTHER; note = 2'-deoxy-2'-fluorocytidine-3'-phosphate
  modified_base 10: mod_base = OTHER; note = 2'-deoxy-2'-fluoroadenosine-3'-phosphate
  modified_base 11: mod_base = OTHER; note = 2'-deoxy-2'-fluorouridine-3'-phosphate
  modified_base 12: mod_base = OTHER; note = 2'-O-methylcytidine-3'-phosphate
  modified_base 13: mod_base = OTHER; note = 2'-O-methylguanosine-3'-phosphate
  modified_base 14: mod_base = OTHER; note = 2'-O-methylguanosine-3'-phosphate
  modified_base 15: mod_base = OTHER; note = 2'-O-methylguanosine-3'-phosphate
  modified_base 16: mod_base = OTHER; note = 2'-O-methyladenosine-3'-phosphate
  modified_base 17: mod_base = OTHER; note = 2'-O-methyluridine-3'-phosphate
  modified_base 18: mod_base = OTHER; note = 2'-O-methyladenosine-3'-phosphate
  modified_base 19: mod_base = OTHER; note = 2'-O-methylguanosine-3'-phosphate
  modified_base 20: mod_base = OTHER; note = 2'-O-methyladenosine-3'-phosphate
  modified_base 21: mod_base = OTHER; note = 2'-O-methyluridine-3'-phosphate ((2S,4R)-1-[29-[[2-(acetylamino)-2-deoxy-beta-D-galactopyra nosyl]oxy]-14,14-bis[[3-[[3-[[5-[[2-(acetylamino)-2-deoxy-b eta-D-galactopyranosyl]oxy]-1-oxopentyl]amino]propyl]amino] -3-oxopropoxy]methyl]-1,12,19,25-tetraoxo-16-oxa-13,20,24-t riazanonacos-1-yl]-4-hydroxy-2-pyrrolidinyl)methyl ester
tgggaagtcatcgggatagat

SEQ ID NO: 899 - RNA, 21 nt, synthetic construct
  source 1..21: mol_type = other RNA
  modified_base 1: mod_base = OTHER; note = 2'-O-methylguanosine-3'-phosphorothioate
  modified_base 2: mod_base = OTHER; note = 2'-O-methyluridine-3'-phosphorothioate
  modified_base 3: mod_base = OTHER; note = 2'-O-methylcytidine-3'-phosphate
  modified_base 4: mod_base = OTHER; note = 2'-O-methyladenosine-3'-phosphate
  modified_base 5: mod_base = OTHER; note = 2'-O-methyluridine-3'-phosphate
  modified_base 6: mod_base = OTHER; note = 2'-O-methylcytidine-3'-phosphate
  modified_base 7: mod_base = OTHER; note = 2'-deoxy-2'-fluoroguanosine-3'-phosphate
  modified_base 8: mod_base = OTHER; note = 2'-O-methylguanosine-3'-phosphate
  modified_base 9: mod_base = OTHER; note = 2'-deoxy-2'-fluoroguanosine-3'-phosphate
  modified_base 10: mod_base = OTHER; note = 2'-deoxy-2'-fluoroadenosine-3'-phosphate
  modified_base 11: mod_base = OTHER; note = 2'-deoxy-2'-fluorouridine-3'-phosphate
  modified_base 12: mod_base = OTHER; note = 2'-O-methyladenosine-3'-phosphate
  modified_base 13: mod_base = OTHER; note = 2'-O-methylguanosine-3'-phosphate
  modified_base 14: mod_base = OTHER; note = 2'-O-methyladenosine-3'-phosphate
  modified_base 15: mod_base = OTHER; note = 2'-O-methyladenosine-3'-phosphate
  modified_base 16: mod_base = OTHER; note = 2'-O-methylguanosine-3'-phosphate
  modified_base 17: mod_base = OTHER; note = 2'-O-methylcytidine-3'-phosphate
  modified_base 18: mod_base = OTHER; note = 2'-O-methyluridine-3'-phosphate
  modified_base 19: mod_base = OTHER; note = 2'-O-methylcytidine-3'-phosphate
  modified_base 20: mod_base = OTHER; note = 2'-O-methyluridine-3'-phosphate
  modified_base 21: mod_base = OTHER; note = 2'-O-methyluridine-3'-phosphate ((2S,4R)-1-[29-[[2-(acetylamino)-2-deoxy-beta-D-galactopyra nosyl]oxy]-14,14-bis[[3-[[3-[[5-[[2-(acetylamino)-2-deoxy-b eta-D-galactopyranosyl]oxy]-1-oxopentyl]amino]propyl]amino] -3-oxopropoxy]methyl]-1,12,19,25-tetraoxo-16-oxa-13,20,24-t riazanonacos-1-yl]-4-hydroxy-2-pyrrolidinyl)methyl ester
gtcatcgggatagaagctctt

SEQ ID NO: 900 - RNA, 21 nt, synthetic construct
  source 1..21: mol_type = other RNA
  modified_base 1: mod_base = OTHER; note = 2'-O-methylguanosine-3'-phosphorothioate
  modified_base 2: mod_base = OTHER; note = 2'-O-methylguanosine-3'-phosphorothioate
  modified_base 3: mod_base = OTHER; note = 2'-O-methyladenosine-3'-phosphate
  modified_base 4: mod_base = OTHER; note = 2'-O-methyluridine-3'-phosphate
  modified_base 5: mod_base = OTHER; note = 2'-O-methyladenosine-3'-phosphate
  modified_base 6: mod_base = OTHER; note = 2'-O-methylguanosine-3'-phosphate
  modified_base 7: mod_base = OTHER; note = 2'-deoxy-2'-fluoroadenosine-3'-phosphate
  modified_base 8: mod_base = OTHER; note = 2'-O-methyladenosine-3'-phosphate
  modified_base 9: mod_base = OTHER; note = 2'-deoxy-2'-fluoroguanosine-3'-phosphate
  modified_base 10: mod_base = OTHER; note = 2'-deoxy-2'-fluorocytidine-3'-phosphate
  modified_base 11: mod_base = OTHER; note = 2'-deoxy-2'-fluorouridine-3'-phosphate
  modified_base 12: mod_base = OTHER; note = 2'-O-methylcytidine-3'-phosphate
  modified_base 13: mod_base = OTHER; note = 2'-O-methyluridine-3'-phosphate
  modified_base 14: mod_base = OTHER; note = 2'-O-methyladenosine-3'-phosphate
  modified_base 15: mod_base = OTHER; note = 2'-O-methyladenosine-3'-phosphate
  modified_base 16: mod_base = OTHER; note = 2'-O-methylcytidine-3'-phosphate
  modified_base 17: mod_base = OTHER; note = 2'-O-methylcytidine-3'-phosphate
  modified_base 18: mod_base = OTHER; note = 2'-O-methyladenosine-3'-phosphate
  modified_base 19: mod_base = OTHER; note = 2'-O-methylguanosine-3'-phosphate
  modified_base 20: mod_base = OTHER; note = 2'-O-methyluridine-3'-phosphate
  modified_base 21: mod_base = OTHER; note = 2'-O-methyluridine-3'-phosphate ((2S,4R)-1-[29-[[2-(acetylamino)-2-deoxy-beta-D-galactopyra nosyl]oxy]-14,14-bis[[3-[[3-[[5-[[2-(acetylamino)-2-deoxy-b eta-D-galactopyranosyl]oxy]-1-oxopentyl]amino]propyl]amino] -3-oxopropoxy]methyl]-1,12,19,25-tetraoxo-16-oxa-13,20,24-t riazanonacos-1-yl]-4-hydroxy-2-pyrrolidinyl)methyl ester
ggatagaagctctaaccagtt

SEQ ID NO: 901 - RNA, 21 nt, synthetic construct
  source 1..21: mol_type = other RNA
  modified_base 1: mod_base = OTHER; note = 2'-O-methylguanosine-3'-phosphorothioate
  modified_base 2: mod_base = OTHER; note = 2'-O-methylcytidine-3'-phosphorothioate
  modified_base 3: mod_base = OTHER; note = 2'-O-methyluridine-3'-phosphate
  modified_base 4: mod_base = OTHER; note = 2'-O-methylcytidine-3'-phosphate
  modified_base 5: mod_base = OTHER; note = 2'-O-methyluridine-3'-phosphate
  modified_base 6: mod_base = OTHER; note = 2'-O-methyladenosine-3'-phosphate
  modified_base 7: mod_base = OTHER; note = 2'-deoxy-2'-fluoroadenosine-3'-phosphate
  modified_base 8: mod_base = OTHER; note = 2'-O-methylcytidine-3'-phosphate
  modified_base 9: mod_base = OTHER; note = 2'-deoxy-2'-fluorocytidine-3'-phosphate
  modified_base 10: mod_base = OTHER; note = 2'-deoxy-2'-fluoroadenosine-3'-phosphate
  modified_base 11: mod_base = OTHER; note = 2'-deoxy-2'-fluoroguanosine-3'-phosphate
  modified_base 12: mod_base = OTHER; note = 2'-O-methyluridine-3'-phosphate
  modified_base 13: mod_base = OTHER; note = 2'-O-methylguanosine-3'-phosphate
  modified_base 14: mod_base = OTHER; note = 2'-O-methyladenosine-3'-phosphate
  modified_base 15: mod_base = OTHER; note = 2'-O-methyluridine-3'-phosphate
  modified_base 16: mod_base = OTHER; note = 2'-O-methyluridine-3'-phosphate
  modified_base 17: mod_base = OTHER; note = 2'-O-methyladenosine-3'-phosphate
  modified_base 18: mod_base = OTHER; note = 2'-O-methyluridine-3'-phosphate
  modified_base 19: mod_base = OTHER; note = 2'-O-methylcytidine-3'-phosphate
  modified_base 20: mod_base = OTHER; note = 2'-O-methyluridine-3'-phosphate
  modified_base 21: mod_base = OTHER; note = 2'-O-methyluridine-3'-phosphate ((2S,4R)-1-[29-[[2-(acetylamino)-2-deoxy-beta-D-galactopyra nosyl]oxy]-14,14-bis[[3-[[3-[[5-[[2-(acetylamino)-2-deoxy-b eta-D-galactopyranosyl]oxy]-1-oxopentyl]amino]propyl]amino] -3-oxopropoxy]methyl]-1,12,19,25-tetraoxo-16-oxa-13,20,24-t riazanonacos-1-yl]-4-hydroxy-2-pyrrolidinyl)methyl ester
gctctaaccagtgattatctt

SEQ ID NO: 902 - RNA, 21 nt, synthetic construct
  source 1..21: mol_type = other RNA
  modified_base 1: mod_base = OTHER; note = 2'-O-methyladenosine-3'-phosphorothioate
  modified_base 2: mod_base = OTHER; note = 2'-O-methylcytidine-3'-phosphorothioate
  modified_base 3: mod_base = OTHER; note = 2'-O-methylcytidine-3'-phosphate
  modified_base 4: mod_base = OTHER; note = 2'-O-methyladenosine-3'-phosphate
  modified_base 5: mod_base = OTHER; note = 2'-O-methylguanosine-3'-phosphate
  modified_base 6: mod_base = OTHER; note = 2'-O-methyluridine-3'-phosphate
  modified_base 7: mod_base = OTHER; note = 2'-deoxy-2'-fluoroguanosine-3'-phosphate
  modified_base 8: mod_base = OTHER; note = 2'-O-methyladenosine-3'-phosphate
  modified_base 9: mod_base = OTHER; note = 2'-deoxy-2'-fluorouridine-3'-phosphate
  modified_base 10: mod_base = OTHER; note = 2'-deoxy-2'-fluorouridine-3'-phosphate
  modified_base 11: mod_base = OTHER; note = 2'-deoxy-2'-fluoroadenosine-3'-phosphate
  modified_base 12: mod_base = OTHER; note = 2'-O-methyluridine-3'-phosphate
  modified_base 13: mod_base = OTHER; note = 2'-O-methylcytidine-3'-phosphate
  modified_base 14: mod_base = OTHER; note = 2'-O-methyluridine-3'-phosphate
  modified_base 15: mod_base = OTHER; note = 2'-O-methyladenosine-3'-phosphate
  modified_base 16: mod_base = OTHER; note = 2'-O-methyluridine-3'-phosphate
  modified_base 17: mod_base = OTHER; note = 2'-O-methyladenosine-3'-phosphate
  modified_base 18: mod_base = OTHER; note = 2'-O-methylcytidine-3'-phosphate
  modified_base 19: mod_base = OTHER; note = 2'-O-methyluridine-3'-phosphate
  modified_base 20: mod_base = OTHER; note = 2'-O-methyladenosine-3'-phosphate
  modified_base 21: mod_base = OTHER; note = 2'-O-methyluridine-3'-phosphate ((2S,4R)-1-[29-[[2-(acetylamino)-2-deoxy-beta-D-galactopyra nosyl]oxy]-14,14-bis[[3-[[3-[[5-[[2-(acetylamino)-2-deoxy-b eta-D-galactopyranosyl]oxy]-1-oxopentyl]amino]propyl]amino] -3-oxopropoxy]methyl]-1,12,19,25-tetraoxo-16-oxa-13,20,24-t riazanonacos-1-yl]-4-hydroxy-2-pyrrolidinyl)methyl ester
accagtgattatctatactat

SEQ ID NO: 903 - RNA, 21 nt, synthetic construct
  source 1..21: mol_type = other RNA
  modified_base 1: mod_base = OTHER; note = 2'-O-methylguanosine-3'-phosphorothioate
  modified_base 2: mod_base = OTHER; note = 2'-O-methyladenosine-3'-phosphorothioate
  modified_base 3: mod_base = OTHER; note = 2'-O-methyluridine-3'-phosphate
  modified_base 4: mod_base = OTHER; note = 2'-O-methyluridine-3'-phosphate
  modified_base 5: mod_base = OTHER; note = 2'-O-methyladenosine-3'-phosphate
  modified_base 6: mod_base = OTHER; note = 2'-O-methyluridine-3'-phosphate
  modified_base 7: mod_base = OTHER; note = 2'-deoxy-2'-fluorocytidine-3'-phosphate
  modified_base 8: mod_base = OTHER; note = 2'-O-methyluridine-3'-phosphate
  modified_base 9: mod_base = OTHER; note = 2'-deoxy-2'-fluoroadenosine-3'-phosphate
  modified_base 10: mod_base = OTHER; note = 2'-deoxy-2'-fluorouridine-3'-phosphate
  modified_base 11: mod_base = OTHER; note = 2'-deoxy-2'-fluoroadenosine-3'-phosphate
  modified_base 12: mod_base = OTHER; note = 2'-O-methylcytidine-3'-phosphate
  modified_base 13: mod_base = OTHER; note = 2'-O-methyluridine-3'-phosphate
  modified_base 14: mod_base = OTHER; note = 2'-O-methyladenosine-3'-phosphate
  modified_base 15: mod_base = OTHER; note = 2'-O-methylcytidine-3'-phosphate
  modified_base 16: mod_base = OTHER; note = 2'-O-methyladenosine-3'-phosphate
  modified_base 17: mod_base = OTHER; note = 2'-O-methyluridine-3'-phosphate
  modified_base 18: mod_base = OTHER; note = 2'-O-methyluridine-3'-phosphate
  modified_base 19: mod_base = OTHER; note = 2'-O-methyladenosine-3'-phosphate
  modified_base 20: mod_base = OTHER; note = 2'-O-methylguanosine-3'-phosphate
  modified_base 21: mod_base = OTHER; note = 2'-O-methyluridine-3'-phosphate ((2S,4R)-1-[29-[[2-(acetylamino)-2-deoxy-beta-D-galactopyra nosyl]oxy]-14,14-bis[[3-[[3-[[5-[[2-(acetylamino)-2-deoxy-b eta-D-galactopyranosyl]oxy]-1-oxopentyl]amino]propyl]amino] -3-oxopropoxy]methyl]-1,12,19,25-tetraoxo-16-oxa-13,20,24-t riazanonacos-1-yl]-4-hydroxy-2-pyrrolidinyl)methyl ester
gattatctatactacattagt

SEQ ID NO: 904 - RNA, 21 nt, synthetic construct
  source 1..21: mol_type = other RNA
  modified_base 1: mod_base = OTHER; note = 2'-O-methyluridine-3'-phosphorothioate
  modified_base 2: mod_base = OTHER; note = 2'-O-methyladenosine-3'-phosphorothioate
  modified_base 3: mod_base = OTHER; note = 2'-O-methyladenosine-3'-phosphate
  modified_base 4: mod_base = OTHER; note = 2'-O-methyluridine-3'-phosphate
  modified_base 5: mod_base = OTHER; note = 2'-O-methylguanosine-3'-phosphate
  modified_base 6: mod_base = OTHER; note = 2'-O-methyladenosine-3'-phosphate
  modified_base 7: mod_base = OTHER; note = 2'-deoxy-2'-fluoroadenosine-3'-phosphate
  modified_base 8: mod_base = OTHER; note = 2'-O-methyluridine-3'-phosphate
  modified_base 9: mod_base = OTHER; note = 2'-deoxy-2'-fluoroadenosine-3'-phosphate
  modified_base 10: mod_base = OTHER; note = 2'-deoxy-2'-fluorouridine-3'-phosphate
  modified_base 11: mod_base = OTHER; note = 2'-deoxy-2'-fluoroadenosine-3'-phosphate
  modified_base 12: mod_base = OTHER; note = 2'-O-methyladenosine-3'-phosphate
  modified_base 13: mod_base = OTHER; note = 2'-O-methyladenosine-3'-phosphate
  modified_base 14: mod_base = OTHER; note = 2'-O-methylguanosine-3'-phosphate
  modified_base 15: mod_base = OTHER; note = 2'-O-methylguanosine-3'-phosphate
  modified_base 16: mod_base = OTHER; note = 2'-O-methyladenosine-3'-phosphate
  modified_base 17: mod_base = OTHER; note = 2'-O-methyladenosine-3'-phosphate
  modified_base 18: mod_base = OTHER; note = 2'-O-methyluridine-3'-phosphate
  modified_base 19: mod_base = OTHER; note = 2'-O-methylguanosine-3'-phosphate
  modified_base 20: mod_base = OTHER; note = 2'-O-methylcytidine-3'-phosphate
  modified_base 21: mod_base = OTHER; note = 2'-O-methyluridine-3'-phosphate ((2S,4R)-1-[29-[[2-(acetylamino)-2-deoxy-beta-D-galactopyra nosyl]oxy]-14,14-bis[[3-[[3-[[5-[[2-(acetylamino)-2-deoxy-b eta-D-galactopyranosyl]oxy]-1-oxopentyl]amino]propyl]amino] -3-oxopropoxy]methyl]-1,12,19,25-tetraoxo-16-oxa-13,20,24-t riazanonacos-1-yl]-4-hydroxy-2-pyrrolidinyl)methyl ester
taatgaatataaaggaatgct

SEQ ID NO: 905 - RNA, 21 nt, synthetic construct
  source 1..21: mol_type = other RNA
  modified_base 1: mod_base = OTHER; note = 2'-O-methyladenosine-3'-phosphorothioate
  modified_base 2: mod_base = OTHER; note = 2'-O-methyluridine-3'-phosphorothioate
  modified_base 3: mod_base = OTHER; note = 2'-O-methyladenosine-3'-phosphate
  modified_base 4: mod_base = OTHER; note = 2'-O-methyluridine-3'-phosphate
  modified_base 5: mod_base = OTHER; note = 2'-O-methyladenosine-3'-phosphate
  modified_base 6: mod_base = OTHER; note = 2'-O-methyladenosine-3'-phosphate
  modified_base 7: mod_base = OTHER; note = 2'-deoxy-2'-fluoroadenosine-3'-phosphate
  modified_base 8: mod_base = OTHER; note = 2'-O-methylguanosine-3'-phosphate
  modified_base 9: mod_base = OTHER; note = 2'-deoxy-2'-fluoroguanosine-3'-phosphate
  modified_base 10: mod_base = OTHER; note = 2'-deoxy-2'-fluoroadenosine-3'-phosphate
  modified_base 11: mod_base = OTHER; note = 2'-deoxy-2'-fluoroadenosine-3'-phosphate
  modified_base 12: mod_base = OTHER; note = 2'-O-methyluridine-3'-phosphate
  modified_base 13: mod_base = OTHER; note = 2'-O-methylguanosine-3'-phosphate
  modified_base 14: mod_base = OTHER; note = 2'-O-methylcytidine-3'-phosphate
  modified_base 15: mod_base = OTHER; note = 2'-O-methylcytidine-3'-phosphate
  modified_base 16: mod_base = OTHER; note = 2'-O-methyladenosine-3'-phosphate
  modified_base 17: mod_base = OTHER; note = 2'-O-methylguanosine-3'-phosphate
  modified_base 18: mod_base = OTHER; note = 2'-O-methylguanosine-3'-phosphate
  modified_base 19: mod_base = OTHER; note = 2'-O-methyladenosine-3'-phosphate
  modified_base 20: mod_base = OTHER; note = 2'-O-methylguanosine-3'-phosphate
  modified_base 21: mod_base = OTHER; note = 2'-O-methyluridine-3'-phosphate ((2S,4R)-1-[29-[[2-(acetylamino)-2-deoxy-beta-D-galactopyra nosyl]oxy]-14,14-bis[[3-[[3-[[5-[[2-(acetylamino)-2-deoxy-b eta-D-galactopyranosyl]oxy]-1-oxopentyl]amino]propyl]amino] -3-oxopropoxy]methyl]-1,12,19,25-tetraoxo-16-oxa-13,20,24-t riazanonacos-1-yl]-4-hydroxy-2-pyrrolidinyl)methyl ester
atataaaggaatgccaggagt

SEQ ID NO: 906 - RNA, 21 nt, synthetic construct
  source 1..21: mol_type = other RNA
  modified_base 1: mod_base = OTHER; note = 2'-O-methylcytidine-3'-phosphorothioate
  modified_base 2: mod_base = OTHER; note = 2'-O-methyladenosine-3'-phosphorothioate
  modified_base 3: mod_base = OTHER; note = 2'-O-methylguanosine-3'-phosphate
  modified_base 4: mod_base = OTHER; note = 2'-O-methylguanosine-3'-phosphate
  modified_base 5: mod_base = OTHER; note = 2'-O-methyladenosine-3'-phosphate
  modified_base 6: mod_base = OTHER; note = 2'-O-methylguanosine-3'-phosphate
  modified_base 7: mod_base = OTHER; note = 2'-deoxy-2'-fluoroguanosine-3'-phosphate
  modified_base 8: mod_base = OTHER; note = 2'-O-methyladenosine-3'-phosphate
  modified_base 9: mod_base = OTHER; note = 2'-deoxy-2'-fluoroadenosine-3'-phosphate
  modified_base 10: mod_base = OTHER; note = 2'-deoxy-2'-fluoroguanosine-3'-phosphate
  modified_base 11: mod_base = OTHER; note = 2'-deoxy-2'-fluoroguanosine-3'-phosphate
  modified_base 12: mod_base = OTHER; note = 2'-O-methyladenosine-3'-phosphate
  modified_base 13: mod_base = OTHER; note = 2'-O-methyladenosine-3'-phosphate
  modified_base 14: mod_base = OTHER; note = 2'-O-methyluridine-3'-phosphate
  modified_base 15: mod_base = OTHER; note = 2'-O-methylcytidine-3'-phosphate
  modified_base 16: mod_base = OTHER; note = 2'-O-methyluridine-3'-phosphate
  modified_base 17: mod_base = OTHER; note = 2'-O-methyluridine-3'-phosphate
  modified_base 18: mod_base = OTHER; note = 2'-O-methyluridine-3'-phosphate
  modified_base 19: mod_base = OTHER; note = 2'-O-methyladenosine-3'-phosphate
  modified_base 20: mod_base = OTHER; note = 2'-O-methyluridine-3'-phosphate
  modified_base 21: mod_base = OTHER; note = 2'-O-methyluridine-3'-phosphate ((2S,4R)-1-[29-[[2-(acetylamino)-2-deoxy-beta-D-galactopyra nosyl]oxy]-14,14-bis[[3-[[3-[[5-[[2-(acetylamino)-2-deoxy-b eta-D-galactopyranosyl]oxy]-1-oxopentyl]amino]propyl]amino] -3-oxopropoxy]methyl]-1,12,19,25-tetraoxo-16-oxa-13,20,24-t riazanonacos-1-yl]-4-hydroxy-2-pyrrolidinyl)methyl ester
caggaggaaggaatctttatt

SEQ ID NO: 907 - RNA, 21 nt, synthetic construct
  source 1..21: mol_type = other RNA
  modified_base 1: mod_base = OTHER; note = 2'-O-methylguanosine-3'-phosphorothioate
  modified_base 2: mod_base = OTHER; note = 2'-O-methyladenosine-3'-phosphorothioate
  modified_base 3: mod_base = OTHER; note = 2'-O-methyladenosine-3'-phosphate
  modified_base 4: mod_base = OTHER; note = 2'-O-methylguanosine-3'-phosphate
  modified_base 5: mod_base = OTHER; note = 2'-O-methylguanosine-3'-phosphate
  modified_base 6: mod_base = OTHER; note = 2'-O-methyladenosine-3'-phosphate
  modified_base 7: mod_base = OTHER; note = 2'-deoxy-2'-fluoroadenosine-3'-phosphate
  modified_base 8: mod_base = OTHER; note = 2'-O-methyluridine-3'-phosphate
  modified_base 9: mod_base = OTHER; note = 2'-deoxy-2'-fluorocytidine-3'-phosphate
  modified_base 10: mod_base = OTHER; note = 2'-deoxy-2'-fluorouridine-3'-phosphate
  modified_base 11: mod_base = OTHER; note = 2'-deoxy-2'-fluorouridine-3'-phosphate
  modified_base 12: mod_base = OTHER; note = 2'-O-methyluridine-3'-phosphate
  modified_base 13: mod_base = OTHER; note = 2'-O-methyladenosine-3'-phosphate
  modified_base 14: mod_base = OTHER; note = 2'-O-methyluridine-3'-phosphate
  modified_base 15: mod_base = OTHER; note = 2'-O-methyladenosine-3'-phosphate
  modified_base 16: mod_base = OTHER; note = 2'-O-methyladenosine-3'-phosphate
  modified_base 17: mod_base = OTHER; note = 2'-O-methyladenosine-3'-phosphate
  modified_base 18: mod_base = OTHER; note = 2'-O-methyladenosine-3'-phosphate
  modified_base 19: mod_base = OTHER; note = 2'-O-methyluridine-3'-phosphate
  modified_base 20: mod_base = OTHER; note = 2'-O-methylcytidine-3'-phosphate
  modified_base 21: mod_base = OTHER; note = 2'-O-methyluridine-3'-phosphate ((2S,4R)-1-[29-[[2-(acetylamino)-2-deoxy-beta-D-galactopyra nosyl]oxy]-14,14-bis[[3-[[3-[[5-[[2-(acetylamino)-2-deoxy-b eta-D-galactopyranosyl]oxy]-1-oxopentyl]amino]propyl]amino] -3-oxopropoxy]methyl]-1,12,19,25-tetraoxo-16-oxa-13,20,24-t riazanonacos-1-yl]-4-hydroxy-2-pyrrolidinyl)methyl ester
gaaggaatctttataaaatct

SEQ ID NO: 908 - RNA, 21 nt, synthetic construct
  source 1..21: mol_type = other RNA
  modified_base 1: mod_base = OTHER; note = 2'-O-methyluridine-3'-phosphorothioate
  modified_base 2: mod_base = OTHER; note = 2'-O-methyluridine-3'-phosphorothioate
  modified_base 3: mod_base = OTHER; note = 2'-O-methyladenosine-3'-phosphate
  modified_base 4: mod_base = OTHER; note = 2'-O-methyluridine-3'-phosphate
  modified_base 5: mod_base = OTHER; note = 2'-O-methyladenosine-3'-phosphate
  modified_base 6: mod_base = OTHER; note = 2'-O-methyladenosine-3'-phosphate
  modified_base 7: mod_base = OTHER; note = 2'-deoxy-2'-fluoroadenosine-3'-phosphate
  modified_base 8: mod_base = OTHER; note = 2'-O-methyladenosine-3'-phosphate
  modified_base 9: mod_base = OTHER; note = 2'-deoxy-2'-fluorouridine-3'-phosphate
  modified_base 10: mod_base = OTHER; note = 2'-deoxy-2'-fluorocytidine-3'-phosphate
  modified_base 11: mod_base = OTHER; note = 2'-deoxy-2'-fluorocytidine-3'-phosphate
  modified_base 12: mod_base = OTHER; note = 2'-O-methyladenosine-3'-phosphate
  modified_base 13: mod_base = OTHER; note = 2'-O-methyladenosine-3'-phosphate
  modified_base 14: mod_base = OTHER; note = 2'-O-methylcytidine-3'-phosphate
  modified_base 15: mod_base = OTHER; note = 2'-O-methyluridine-3'-phosphate
  modified_base 16: mod_base = OTHER; note = 2'-O-methyluridine-3'-phosphate
  modified_base 17: mod_base = OTHER; note = 2'-O-methyladenosine-3'-phosphate
  modified_base 18: mod_base = OTHER; note = 2'-O-methylguanosine-3'-phosphate
  modified_base 19: mod_base = OTHER; note = 2'-O-methyluridine-3'-phosphate
  modified_base 20: mod_base = OTHER; note = 2'-O-methylguanosine-3'-phosphate
  modified_base 21: mod_base = OTHER; note = 2'-O-methyluridine-3'-phosphate ((2S,4R)-1-[29-[[2-(acetylamino)-2-deoxy-beta-D-galactopyra nosyl]oxy]-14,14-bis[[3-[[3-[[5-[[2-(acetylamino)-2-deoxy-b eta-D-galactopyranosyl]oxy]-1-oxopentyl]amino]propyl]amino] -3-oxopropoxy]methyl]-1,12,19,25-tetraoxo-16-oxa-13,20,24-t riazanonacos-1-yl]-4-hydroxy-2-pyrrolidinyl)methyl ester
ttataaaatccaacttagtgt

SEQ ID NO: 909 - RNA, 21 nt, synthetic construct
  source 1..21: mol_type = other RNA
  modified_base 1: mod_base = OTHER; note = 2'-O-methylcytidine-3'-phosphorothioate
  modified_base 2: mod_base = OTHER; note = 2'-O-methyladenosine-3'-phosphorothioate
  modified_base 3: mod_base = OTHER; note = 2'-O-methyladenosine-3'-phosphate
  modified_base 4: mod_base = OTHER; note = 2'-O-methylcytidine-3'-phosphate
  modified_base 5: mod_base = OTHER; note = 2'-O-methyluridine-3'-phosphate
  modified_base 6: mod_base = OTHER; note = 2'-O-methyluridine-3'-phosphate
  modified_base 7: mod_base = OTHER; note = 2'-deoxy-2'-fluoroadenosine-3'-phosphate
  modified_base 8: mod_base = OTHER; note = 2'-O-methylguanosine-3'-phosphate
  modified_base 9: mod_base = OTHER; note = 2'-deoxy-2'-fluorouridine-3'-phosphate
  modified_base 10: mod_base = OTHER; note = 2'-deoxy-2'-fluoroguanosine-3'-phosphate
  modified_base 11: mod_base = OTHER; note = 2'-deoxy-2'-fluoroadenosine-3'-phosphate
  modified_base 12: mod_base = OTHER; note = 2'-O-methylcytidine-3'-phosphate
  modified_base 13: mod_base = OTHER; note = 2'-O-methyluridine-3'-phosphate
  modified_base 14: mod_base = OTHER; note = 2'-O-methyladenosine-3'-phosphate
  modified_base 15: mod_base = OTHER; note = 2'-O-methyluridine-3'-phosphate
  modified_base 16: mod_base = OTHER; note = 2'-O-methyladenosine-3'-phosphate
  modified_base 17: mod_base = OTHER; note = 2'-O-methylcytidine-3'-phosphate
  modified_base 18: mod_base = OTHER; note = 2'-O-methyladenosine-3'-phosphate
  modified_base 19: mod_base = OTHER; note = 2'-O-methyladenosine-3'-phosphate
  modified_base 20: mod_base = OTHER; note = 2'-O-methyladenosine-3'-phosphate
  modified_base 21: mod_base = OTHER; note = 2'-O-methyluridine-3'-phosphate ((2S,4R)-1-[29-[[2-(acetylamino)-2-deoxy-beta-D-galactopyra nosyl]oxy]-14,14-bis[[3-[[3-[[5-[[2-(acetylamino)-2-deoxy-b eta-D-galactopyranosyl]oxy]-1-oxopentyl]amino]propyl]amino] -3-oxopropoxy]methyl]-1,12,19,25-tetraoxo-16-oxa-13,20,24-t riazanonacos-1-yl]-4-hydroxy-2-pyrrolidinyl)methyl ester
caacttagtgactatacaaat

SEQ ID NO: 910 - RNA, 21 nt, synthetic construct
  source 1..21: mol_type = other RNA
  modified_base 1: mod_base = OTHER; note = 2'-O-methyluridine-3'-phosphorothioate
  modified_base 2: mod_base = OTHER; note = 2'-O-methylguanosine-3'-phosphorothioate
  modified_base 3: mod_base = OTHER; note = 2'-O-methyladenosine-3'-phosphate
  modified_base 4: mod_base = OTHER; note = 2'-O-methylcytidine-3'-phosphate
  modified_base 5: mod_base = OTHER; note = 2'-O-methyluridine-3'-phosphate
  modified_base 6: mod_base = OTHER; note = 2'-O-methyladenosine-3'-phosphate
  modified_base 7: mod_base = OTHER; note = 2'-deoxy-2'-fluorouridine-3'-phosphate
  modified_base 8: mod_base = OTHER; note = 2'-O-methyladenosine-3'-phosphate
  modified_base 9: mod_base = OTHER; note = 2'-deoxy-2'-fluorocytidine-3'-phosphate
  modified_base 10: mod_base = OTHER; note = 2'-deoxy-2'-fluoroadenosine-3'-phosphate
  modified_base 11: mod_base = OTHER; note = 2'-deoxy-2'-fluoroadenosine-3'-phosphate
  modified_base 12: mod_base = OTHER; note = 2'-O-methyladenosine-3'-phosphate
  modified_base 13: mod_base = OTHER; note = 2'-O-methyladenosine-3'-phosphate
  modified_base 14: mod_base = OTHER; note = 2'-O-methylguanosine-3'-phosphate
  modified_base 15: mod_base = OTHER; note = 2'-O-methyluridine-3'-phosphate
  modified_base 16: mod_base = OTHER; note = 2'-O-methylguanosine-3'-phosphate
  modified_base 17: mod_base = OTHER; note = 2'-O-methyladenosine-3'-phosphate
  modified_base 18: mod_base = OTHER; note = 2'-O-methylcytidine-3'-phosphate
  modified_base 19: mod_base = OTHER; note = 2'-O-methyladenosine-3'-phosphate
  modified_base 20: mod_base = OTHER; note = 2'-O-methyluridine-3'-phosphate
  modified_base 21: mod_base = OTHER; note = 2'-O-methyluridine-3'-phosphate ((2S,4R)-1-[29-[[2-(acetylamino)-2-deoxy-beta-D-galactopyra nosyl]oxy]-14,14-bis[[3-[[3-[[5-[[2-(acetylamino)-2-deoxy-b eta-D-galactopyranosyl]oxy]-1-oxopentyl]amino]propyl]amino] -3-oxopropoxy]methyl]-1,12,19,25-tetraoxo-16-oxa-13,20,24-t riazanonacos-1-yl]-4-hydroxy-2-pyrrolidinyl)methyl ester
tgactatacaaaagtgacatt

SEQ ID NO: 911 - RNA, 21 nt, synthetic construct
  source 1..21: mol_type = other RNA
  modified_base 1: mod_base = OTHER; note = 2'-O-methyladenosine-3'-phosphorothioate
  modified_base 2: mod_base = OTHER; note = 2'-O-methyladenosine-3'-phosphorothioate
  modified_base 3: mod_base = OTHER; note = 2'-O-methyladenosine-3'-phosphate
  modified_base 4: mod_base = OTHER; note = 2'-O-methyladenosine-3'-phosphate
  modified_base 5: mod_base = OTHER; note = 2'-O-methylguanosine-3'-phosphate
  modified_base 6: mod_base = OTHER; note = 2'-O-methyluridine-3'-phosphate
  modified_base 7: mod_base = OTHER; note = 2'-deoxy-2'-fluoroguanosine-3'-phosphate
  modified_base 8: mod_base = OTHER; note = 2'-O-methyladenosine-3'-phosphate
  modified_base 9: mod_base = OTHER; note = 2'-deoxy-2'-fluorocytidine-3'-phosphate
  modified_base 10: mod_base = OTHER; note = 2'-deoxy-2'-fluoroadenosine-3'-phosphate
  modified_base 11: mod_base = OTHER; note = 2'-deoxy-2'-fluorouridine-3'-phosphate
  modified_base 12: mod_base = OTHER; note = 2'-O-methylguanosine-3'-phosphate
  modified_base 13: mod_base = OTHER; note = 2'-O-methylcytidine-3'-phosphate
  modified_base 14: mod_base = OTHER; note = 2'-O-methylcytidine-3'-phosphate
  modified_base 15: mod_base = OTHER; note = 2'-O-methyluridine-3'-phosphate
  modified_base 16: mod_base = OTHER; note = 2'-O-methylcytidine-3'-phosphate
  modified_base 17: mod_base = OTHER; note = 2'-O-methyladenosine-3'-phosphate
  modified_base 18: mod_base = OTHER; note = 2'-O-methylguanosine-3'-phosphate
  modified_base 19: mod_base = OTHER; note = 2'-O-methyluridine-3'-phosphate
  modified_base 20: mod_base = OTHER; note = 2'-O-methyluridine-3'-phosphate
  modified_base 21: mod_base = OTHER; note = 2'-O-methyluridine-3'-phosphate ((2S,4R)-1-[29-[[2-(acetylamino)-2-deoxy-beta-D-galactopyra nosyl]oxy]-14,14-bis[[3-[[3-[[5-[[2-(acetylamino)-2-deoxy-b eta-D-galactopyranosyl]oxy]-1-oxopentyl]amino]propyl]amino] -3-oxopropoxy]methyl]-1,12,19,25-tetraoxo-16-oxa-13,20,24-t riazanonacos-1-yl]-4-hydroxy-2-pyrrolidinyl)methyl ester
aaaagtgacatgcctcagttt

SEQ ID NO: 912 - RNA, 21 nt, synthetic construct
  source 1..21: mol_type = other RNA
  modified_base 1: mod_base = OTHER; note = 2'-O-methylcytidine-3'-phosphorothioate
  modified_base 2: mod_base = OTHER; note = 2'-O-methylcytidine-3'-phosphorothioate
  modified_base 3: mod_base = OTHER; note = 2'-O-methyluridine-3'-phosphate
  modified_base 4: mod_base = OTHER; note = 2'-O-methylcytidine-3'-phosphate
  modified_base 5: mod_base = OTHER; note = 2'-O-methyladenosine-3'-phosphate
  modified_base 6: mod_base = OTHER; note = 2'-O-methylguanosine-3'-phosphate
  modified_base 7: mod_base = OTHER; note = 2'-deoxy-2'-fluorouridine-3'-phosphate
  modified_base 8: mod_base = OTHER; note = 2'-O-methyluridine-3'-phosphate
  modified_base 9: mod_base = OTHER; note = 2'-deoxy-2'-fluoroguanosine-3'-phosphate
  modified_base 10: mod_base = OTHER; note = 2'-deoxy-2'-fluorouridine-3'-phosphate
  modified_base 11: mod_base = OTHER; note = 2'-deoxy-2'-fluoroguanosine-3'-phosphate
  modified_base 12: mod_base = OTHER; note = 2'-O-methyladenosine-3'-phosphate
  modified_base 13: mod_base = OTHER; note = 2'-O-methylguanosine-3'-phosphate
  modified_base 14: mod_base = OTHER; note = 2'-O-methylcytidine-3'-phosphate
  modified_base 15: mod_base = OTHER; note = 2'-O-methyluridine-3'-phosphate
  modified_base 16: mod_base = OTHER; note = 2'-O-methylguanosine-3'-phosphate
  modified_base 17: mod_base = OTHER; note = 2'-O-methyladenosine-3'-phosphate
  modified_base 18: mod_base = OTHER; note = 2'-O-methyladenosine-3'-phosphate
  modified_base 19: mod_base = OTHER; note = 2'-O-methyluridine-3'-phosphate
  modified_base 20: mod_base = OTHER; note = 2'-O-methylcytidine-3'-phosphate
  modified_base 21: mod_base = OTHER; note = 2'-O-methyluridine-3'-phosphate ((2S,4R)-1-[29-[[2-(acetylamino)-2-deoxy-beta-D-galactopyra nosyl]oxy]-14,14-bis[[3-[[3-[[5-[[2-(acetylamino)-2-deoxy-b eta-D-galactopyranosyl]oxy]-1-oxopentyl]amino]propyl]amino] -3-oxopropoxy]methyl]-1,12,19,25-tetraoxo-16-oxa-13,20,24-t riazanonacos-1-yl]-4-hydroxy-2-pyrrolidinyl)methyl ester
cctcagttgtgagctgaatct

SEQ ID NO: 913 - RNA, 21 nt, synthetic construct
  source 1..21: mol_type = other RNA
  modified_base 1: mod_base = OTHER; note = 2'-O-methylguanosine-3'-phosphorothioate
  modified_base 2: mod_base = OTHER; note = 2'-O-methyladenosine-3'-phosphorothioate
  modified_base 3: mod_base = OTHER; note = 2'-O-methylguanosine-3'-phosphate
  modified_base 4: mod_base = OTHER; note = 2'-O-methylcytidine-3'-phosphate
  modified_base 5: mod_base = OTHER; note = 2'-O-methyluridine-3'-phosphate
  modified_base 6: mod_base = OTHER; note = 2'-O-methylguanosine-3'-phosphate
  modified_base 7: mod_base = OTHER; note = 2'-deoxy-2'-fluoroadenosine-3'-phosphate
  modified_base 8: mod_base = OTHER; note = 2'-O-methyladenosine-3'-phosphate
  modified_base 9: mod_base = OTHER; note = 2'-deoxy-2'-fluorouridine-3'-phosphate
  modified_base 10: mod_base = OTHER; note = 2'-deoxy-2'-fluorocytidine-3'-phosphate
  modified_base 11: mod_base = OTHER; note = 2'-deoxy-2'-fluorocytidine-3'-phosphate
  modified_base 12: mod_base = OTHER; note = 2'-O-methylguanosine-3'-phosphate
  modified_base 13: mod_base = OTHER; note = 2'-O-methylguanosine-3'-phosphate
  modified_base 14: mod_base = OTHER; note = 2'-O-methyladenosine-3'-phosphate
  modified_base 15: mod_base = OTHER; note = 2'-O-methyladenosine-3'-phosphate
  modified_base 16: mod_base = OTHER; note = 2'-O-methyladenosine-3'-phosphate
  modified_base 17: mod_base = OTHER; note = 2'-O-methylguanosine-3'-phosphate
  modified_base 18: mod_base = OTHER; note = 2'-O-methylguanosine-3'-phosphate
  modified_base 19: mod_base = OTHER; note = 2'-O-methyluridine-3'-phosphate
  modified_base 20: mod_base = OTHER; note = 2'-O-methylguanosine-3'-phosphate
  modified_base 21: mod_base = OTHER; note = 2'-O-methyluridine-3'-phosphate ((2S,4R)-1-[29-[[2-(acetylamino)-2-deoxy-beta-D-galactopyra nosyl]oxy]-14,14-bis[[3-[[3-[[5-[[2-(acetylamino)-2-deoxy-b eta-D-galactopyranosyl]oxy]-1-oxopentyl]amino]propyl]amino] -3-oxopropoxy]methyl]-1,12,19,25-tetraoxo-16-oxa-13,20,24-t riazanonacos-1-yl]-4-hydroxy-2-pyrrolidinyl)methyl ester
gagctgaatccggaaaggtgt

SEQ ID NO: 914 - RNA, 21 nt, synthetic construct
  source 1..21: mol_type = other RNA
  modified_base 1: mod_base = OTHER; note = 2'-O-methylcytidine-3'-phosphorothioate
  modified_base 2: mod_base = OTHER; note = 2'-O-methylcytidine-3'-phosphorothioate
  modified_base 3: mod_base = OTHER; note = 2'-O-methylguanosine-3'-phosphate
  modified_base 4: mod_base = OTHER; note = 2'-O-methylguanosine-3'-phosphate
  modified_base 5: mod_base = OTHER; note = 2'-O-methyladenosine-3'-phosphate
  modified_base 6: mod_base = OTHER; note = 2'-O-methyladenosine-3'-phosphate
  modified_base 7: mod_base = OTHER; note = 2'-deoxy-2'-fluoroadenosine-3'-phosphate
  modified_base 8: mod_base = OTHER; note = 2'-O-methylguanosine-3'-phosphate
  modified_base 9: mod_base = OTHER; note = 2'-deoxy-2'-fluoroguanosine-3'-phosphate
  modified_base 10: mod_base = OTHER; note = 2'-deoxy-2'-fluorouridine-3'-phosphate
  modified_base 11: mod_base = OTHER; note = 2'-deoxy-2'-fluoroguanosine-3'-phosphate
  modified_base 12: mod_base = OTHER; note = 2'-O-methyluridine-3'-phosphate
  modified_base 13: mod_base = OTHER; note = 2'-O-methylcytidine-3'-phosphate
  modified_base 14: mod_base = OTHER; note = 2'-O-methyladenosine-3'-phosphate
  modified_base 15: mod_base = OTHER; note = 2'-O-methylguanosine-3'-phosphate
  modified_base 16: mod_base = OTHER; note = 2'-O-methyluridine-3'-phosphate
  modified_base 17: mod_base = OTHER; note = 2'-O-methyladenosine-3'-phosphate
  modified_base 18: mod_base = OTHER; note = 2'-O-methylcytidine-3'-phosphate
  modified_base 19: mod_base = OTHER; note = 2'-O-methyluridine-3'-phosphate
  modified_base 20: mod_base = OTHER; note = 2'-O-methyladenosine-3'-phosphate
  modified_base 21: mod_base = OTHER; note = 2'-O-methyluridine-3'-phosphate ((2S,4R)-1-[29-[[2-(acetylamino)-2-deoxy-beta-D-galactopyra nosyl]oxy]-14,14-bis[[3-[[3-[[5-[[2-(acetylamino)-2-deoxy-b eta-D-galactopyranosyl]oxy]-1-oxopentyl]amino]propyl]amino] -3-oxopropoxy]methyl]-1,12,19,25-tetraoxo-16-oxa-13,20,24-t riazanonacos-1-yl]-4-hydroxy-2-pyrrolidinyl)methyl ester
ccggaaaggtgtcagtactat

SEQ ID NO: 915 - RNA, 21 nt, synthetic construct
  source 1..21: mol_type = other RNA
  modified_base 1: mod_base = OTHER; note = 2'-O-methyladenosine-3'-phosphorothioate
  modified_base 2: mod_base = OTHER; note = 2'-O-methylguanosine-3'-phosphorothioate
  modified_base 3: mod_base = OTHER; note = 2'-O-methylguanosine-3'-phosphate
  modified_base 4: mod_base = OTHER; note = 2'-O-methyluridine-3'-phosphate
  modified_base 5: mod_base = OTHER; note = 2'-O-methylguanosine-3'-phosphate
  modified_base 6: mod_base = OTHER; note = 2'-O-methyluridine-3'-phosphate
  modified_base 7: mod_base = OTHER; note = 2'-deoxy-2'-fluorocytidine-3'-phosphate
  modified_base 8: mod_base = OTHER; note = 2'-O-methyladenosine-3'-phosphate
  modified_base 9: mod_base = OTHER; note = 2'-deoxy-2'-fluoroguanosine-3'-phosphate
  modified_base 10: mod_base = OTHER; note = 2'-deoxy-2'-fluorouridine-3'-phosphate
  modified_base 11: mod_base = OTHER; note = 2'-deoxy-2'-fluoroadenosine-3'-phosphate
  modified_base 12: mod_base = OTHER; note = 2'-O-methylcytidine-3'-phosphate
  modified_base 13: mod_base = OTHER; note = 2'-O-methyluridine-3'-phosphate
  modified_base 14: mod_base = OTHER; note = 2'-O-methyladenosine-3'-phosphate
  modified_base 15: mod_base = OTHER; note = 2'-O-methyluridine-3'-phosphate
  modified_base 16: mod_base = OTHER; note = 2'-O-methyluridine-3'-phosphate
  modified_base 17: mod_base = OTHER; note = 2'-O-methylcytidine-3'-phosphate
  modified_base 18: mod_base = OTHER; note = 2'-O-methyluridine-3'-phosphate
  modified_base 19: mod_base = OTHER; note = 2'-O-methylguanosine-3'-phosphate
  modified_base 20: mod_base = OTHER; note = 2'-O-methyluridine-3'-phosphate
  modified_base 21: mod_base = OTHER; note = 2'-O-methyluridine-3'-phosphate ((2S,4R)-1-[29-[[2-(acetylamino)-2-deoxy-beta-D-galactopyra nosyl]oxy]-14,14-bis[[3-[[3-[[5-[[2-(acetylamino)-2-deoxy-b eta-D-galactopyranosyl]oxy]-1-oxopentyl]amino]propyl]amino] -3-oxopropoxy]methyl]-1,12,19,25-tetraoxo-16-oxa-13,20,24-t riazanonacos-1-yl]-4-hydroxy-2-pyrrolidinyl)methyl ester
aggtgtcagtactattctgtt

SEQ ID NO: 916 - RNA, 21 nt, synthetic construct
  source 1..21: mol_type = other RNA
  modified_base 1: mod_base = OTHER; note = 2'-O-methylcytidine-3'-phosphorothioate
  modified_base 2: mod_base = OTHER; note = 2'-O-methyladenosine-3'-phosphorothioate
  modified_base 3: mod_base = OTHER; note = 2'-O-methylguanosine-3'-phosphate
  modified_base 4: mod_base = OTHER; note = 2'-O-methyluridine-3'-phosphate
  modified_base 5: mod_base = OTHER; note = 2'-O-methyladenosine-3'-phosphate
  modified_base 6: mod_base = OTHER; note = 2'-O-methylcytidine-3'-phosphate
  modified_base 7: mod_base = OTHER; note = 2'-deoxy-2'-fluorouridine-3'-phosphate
  modified_base 8: mod_base = OTHER; note = 2'-O-methyladenosine-3'-phosphate
  modified_base 9: mod_base = OTHER; note = 2'-deoxy-2'-fluorouridine-3'-phosphate
  modified_base 10: mod_base = OTHER; note = 2'-deoxy-2'-fluorouridine-3'-phosphate
  modified_base 11: mod_base = OTHER; note = 2'-deoxy-2'-fluorocytidine-3'-phosphate
  modified_base 12: mod_base = OTHER; note = 2'-O-methyluridine-3'-phosphate
  modified_base 13: mod_base = OTHER; note = 2'-O-methylguanosine-3'-phosphate
  modified_base 14: mod_base = OTHER; note = 2'-O-methyluridine-3'-phosphate
  modified_base 15: mod_base = OTHER; note = 2'-O-methylguanosine-3'-phosphate
  modified_base 16: mod_base = OTHER; note = 2'-O-methyluridine-3'-phosphate
  modified_base 17: mod_base = OTHER; note = 2'-O-methylcytidine-3'-phosphate
  modified_base 18: mod_base = OTHER; note = 2'-O-methyladenosine-3'-phosphate
  modified_base 19: mod_base = OTHER; note = 2'-O-methyluridine-3'-phosphate
  modified_base 20: mod_base = OTHER; note = 2'-O-methyluridine-3'-phosphate
  modified_base 21: mod_base = OTHER; note = 2'-O-methyluridine-3'-phosphate ((2S,4R)-1-[29-[[2-(acetylamino)-2-deoxy-beta-D-galactopyra nosyl]oxy]-14,14-bis[[3-[[3-[[5-[[2-(acetylamino)-2-deoxy-b eta-D-galactopyranosyl]oxy]-1-oxopentyl]amino]propyl]amino] -3-oxopropoxy]methyl]-1,12,19,25-tetraoxo-16-oxa-13,20,24-t riazanonacos-1-yl]-4-hydroxy-2-pyrrolidinyl)methyl ester
cagtactattctgtgtcattt

SEQ ID NO: 917 - RNA, 21 nt, synthetic construct
  source 1..21: mol_type = other RNA
  modified_base 1: mod_base = OTHER; note = 2'-O-methylcytidine-3'-phosphorothioate
  modified_base 2: mod_base = OTHER; note = 2'-O-methyluridine-3'-phosphorothioate
  modified_base 3: mod_base = OTHER; note = 2'-O-methylguanosine-3'-phosphate
  modified_base 4: mod_base = OTHER; note = 2'-O-methyluridine-3'-phosphate
  modified_base 5: mod_base = OTHER; note = 2'-O-methylguanosine-3'-phosphate
  modified_base 6: mod_base = OTHER; note = 2'-O-methyluridine-3'-phosphate
  modified_base 7: mod_base = OTHER; note = 2'-deoxy-2'-fluorocytidine-3'-phosphate
  modified_base 8: mod_base = OTHER; note = 2'-O-methyladenosine-3'-phosphate
  modified_base 9: mod_base = OTHER; note = 2'-deoxy-2'-fluorouridine-3'-phosphate
  modified_base 10: mod_base = OTHER; note = 2'-deoxy-2'-fluorouridine-3'-phosphate
  modified_base 11: mod_base = OTHER; note = 2'-deoxy-2'-fluorocytidine-3'-phosphate
  modified_base 12: mod_base = OTHER; note = 2'-O-methyladenosine-3'-phosphate
  modified_base 13: mod_base = OTHER; note = 2'-O-methylguanosine-3'-phosphate
  modified_base 14: mod_base = OTHER; note = 2'-O-methyluridine-3'-phosphate
  modified_base 15: mod_base = OTHER; note = 2'-O-methyladenosine-3'-phosphate
  modified_base 16: mod_base = OTHER; note = 2'-O-methyladenosine-3'-phosphate
  modified_base 17: mod_base = OTHER; note = 2'-O-methyladenosine-3'-phosphate
  modified_base 18: mod_base = OTHER; note = 2'-O-methylguanosine-3'-phosphate
  modified_base 19: mod_base = OTHER; note = 2'-O-methyladenosine-3'-phosphate
  modified_base 20: mod_base = OTHER; note = 2'-O-methylguanosine-3'-phosphate
  modified_base 21: mod_base = OTHER; note = 2'-O-methyluridine-3'-phosphate ((2S,4R)-1-[29-[[2-(acetylamino)-2-deoxy-beta-D-galactopyra nosyl]oxy]-14,14-bis[[3-[[3-[[5-[[2-(acetylamino)-2-deoxy-b eta-D-galactopyranosyl]oxy]-1-oxopentyl]amino]propyl]amino] -3-oxopropoxy]methyl]-1,12,19,25-tetraoxo-16-oxa-13,20,24-t riazanonacos-1-yl]-4-hydroxy-2-pyrrolidinyl)methyl ester
ctgtgtcattcagtaaagagt

SEQ ID NO: 918 - RNA, 21 nt, synthetic construct
  source 1..21: mol_type = other RNA
  modified_base 1: mod_base = OTHER; note = 2'-O-methyluridine-3'-phosphorothioate
  modified_base 2: mod_base = OTHER; note = 2'-O-methylcytidine-3'-phosphorothioate
  modified_base 3: mod_base = OTHER; note = 2'-O-methyladenosine-3'-phosphate
  modified_base 4: mod_base = OTHER; note = 2'-O-methylguanosine-3'-phosphate
  modified_base 5: mod_base = OTHER; note = 2'-O-methyluridine-3'-phosphate
  modified_base 6: mod_base = OTHER; note = 2'-O-methyladenosine-3'-phosphate
  modified_base 7: mod_base = OTHER; note = 2'-deoxy-2'-fluoroadenosine-3'-phosphate
  modified_base 8: mod_base = OTHER; note = 2'-O-methyladenosine-3'-phosphate
  modified_base 9: mod_base = OTHER; note = 2'-deoxy-2'-fluoroguanosine-3'-phosphate
  modified_base 10: mod_base = OTHER; note = 2'-deoxy-2'-fluoroadenosine-3'-phosphate
  modified_base 11: mod_base = OTHER; note = 2'-deoxy-2'-fluoroguanosine-3'-phosphate
  modified_base 12: mod_base = OTHER; note = 2'-O-methylguanosine-3'-phosphate
  modified_base 13: mod_base = OTHER; note = 2'-O-methylcytidine-3'-phosphate
  modified_base 14: mod_base = OTHER; note = 2'-O-methylguanosine-3'-phosphate
  modified_base 15: mod_base = OTHER; note = 2'-O-methyladenosine-3'-phosphate
  modified_base 16: mod_base = OTHER; note = 2'-O-methyladenosine-3'-phosphate
  modified_base 17: mod_base = OTHER; note = 2'-O-methylguanosine-3'-phosphate
  modified_base 18: mod_base = OTHER; note = 2'-O-methyluridine-3'-phosphate
  modified_base 19: mod_base = OTHER; note = 2'-O-methyladenosine-3'-phosphate
  modified_base 20: mod_base = OTHER; note = 2'-O-methyluridine-3'-phosphate
  modified_base 21: mod_base = OTHER; note = 2'-O-methyluridine-3'-phosphate ((2S,4R)-1-[29-[[2-(acetylamino)-2-deoxy-beta-D-galactopyra nosyl]oxy]-14,14-bis[[3-[[3-[[5-[[2-(acetylamino)-2-deoxy-b eta-D-galactopyranosyl]oxy]-1-oxopentyl]amino]propyl]amino] -3-oxopropoxy]methyl]-1,12,19,25-tetraoxo-16-oxa-13,20,24-t riazanonacos-1-yl]-4-hydroxy-2-pyrrolidinyl)methyl ester
tcagtaaagaggcgaagtatt

SEQ ID NO: 919 - RNA, 21 nt, synthetic construct
  source 1..21: mol_type = other RNA
  modified_base 1: mod_base = OTHER; note = 2'-O-methylguanosine-3'-phosphorothioate
  modified_base 2: mod_base = OTHER; note = 2'-O-methyladenosine-3'-phosphorothioate
  modified_base 3: mod_base = OTHER; note = 2'-O-methylguanosine-3'-phosphate
  modified_base 4: mod_base = OTHER; note = 2'-O-methylguanosine-3'-phosphate
  modified_base 5: mod_base = OTHER; note = 2'-O-methylcytidine-3'-phosphate
  modified_base 6: mod_base = OTHER; note = 2'-O-methylguanosine-3'-phosphate
  modified_base 7: mod_base = OTHER; note = 2'-deoxy-2'-fluoroadenosine-3'-phosphate
  modified_base 8: mod_base = OTHER; note = 2'-O-methyladenosine-3'-phosphate
  modified_base 9: mod_base = OTHER; note = 2'-deoxy-2'-fluoroguanosine-3'-phosphate
  modified_base 10: mod_base = OTHER; note = 2'-deoxy-2'-fluorouridine-3'-phosphate
  modified_base 11: mod_base = OTHER; note = 2'-deoxy-2'-fluoroadenosine-3'-phosphate
  modified_base 12: mod_base = OTHER; note = 2'-O-methyluridine-3'-phosphate
  modified_base 13: mod_base = OTHER; note = 2'-O-methyluridine-3'-phosphate
  modified_base 14: mod_base = OTHER; note = 2'-O-methyladenosine-3'-phosphate
  modified_base 15: mod_base = OTHER; note = 2'-O-methyluridine-3'-phosphate
  modified_base 16: mod_base = OTHER; note = 2'-O-methylcytidine-3'-phosphate
  modified_base 17: mod_base = OTHER; note = 2'-O-methyladenosine-3'-phosphate
  modified_base 18: mod_base = OTHER; note = 2'-O-methylguanosine-3'-phosphate
  modified_base 19: mod_base = OTHER; note = 2'-O-methylcytidine-3'-phosphate
  modified_base 20: mod_base = OTHER; note = 2'-O-methyluridine-3'-phosphate
  modified_base 21: mod_base = OTHER; note = 2'-O-methyluridine-3'-phosphate ((2S,4R)-1-[29-[[2-(acetylamino)-2-deoxy-beta-D-galactopyra nosyl]oxy]-14,14-bis[[3-[[3-[[5-[[2-(acetylamino)-2-deoxy-b eta-D-galactopyranosyl]oxy]-1-oxopentyl]amino]propyl]amino] -3-oxopropoxy]methyl]-1,12,19,25-tetraoxo-16-oxa-13,20,24-t riazanonacos-1-yl]-4-hydroxy-2-pyrrolidinyl)methyl ester
gaggcgaagtattatcagctt

SEQ ID NO: 920 - RNA, 21 nt, synthetic construct
  source 1..21: mol_type = other RNA
  modified_base 1: mod_base = OTHER; note = 2'-O-methylguanosine-3'-phosphorothioate
  modified_base 2: mod_base = OTHER; note = 2'-O-methyluridine-3'-phosphorothioate
  modified_base 3: mod_base = OTHER; note = 2'-O-methyladenosine-3'-phosphate
  modified_base 4: mod_base = OTHER; note = 2'-O-methyluridine-3'-phosphate
  modified_base 5: mod_base = OTHER; note = 2'-O-methyluridine-3'-phosphate
  modified_base 6: mod_base = OTHER; note = 2'-O-methyladenosine-3'-phosphate
  modified_base 7: mod_base = OTHER; note = 2'-deoxy-2'-fluorouridine-3'-phosphate
  modified_base 8: mod_base = OTHER; note = 2'-O-methylcytidine-3'-phosphate
  modified_base 9: mod_base = OTHER; note = 2'-deoxy-2'-fluoroadenosine-3'-phosphate
  modified_base 10: mod_base = OTHER; note = 2'-deoxy-2'-fluoroguanosine-3'-phosphate
  modified_base 11: mod_base = OTHER; note = 2'-deoxy-2'-fluorocytidine-3'-phosphate
  modified_base 12: mod_base = OTHER; note = 2'-O-methyluridine-3'-phosphate
  modified_base 13: mod_base = OTHER; note = 2'-O-methylguanosine-3'-phosphate
  modified_base 14: mod_base = OTHER; note = 2'-O-methyladenosine-3'-phosphate
  modified_base 15: mod_base = OTHER; note = 2'-O-methylguanosine-3'-phosphate
  modified_base 16: mod_base = OTHER; note = 2'-O-methyladenosine-3'-phosphate
  modified_base 17: mod_base = OTHER; note = 2'-O-methyluridine-3'-phosphate
  modified_base 18: mod_base = OTHER; note = 2'-O-methylguanosine-3'-phosphate
  modified_base 19: mod_base = OTHER; note = 2'-O-methyluridine-3'-phosphate
  modified_base 20: mod_base = OTHER; note = 2'-O-methyluridine-3'-phosphate
  modified_base 21: mod_base = OTHER; note = 2'-O-methyluridine-3'-phosphate ((2S,4R)-1-[29-[[2-(acetylamino)-2-deoxy-beta-D-galactopyra nosyl]oxy]-14,14-bis[[3-[[3-[[5-[[2-(acetylamino)-2-deoxy-b eta-D-galactopyranosyl]oxy]-1-oxopentyl]amino]propyl]amino] -3-oxopropoxy]methyl]-1,12,19,25-tetraoxo-16-oxa-13,20,24-t riazanonacos-1-yl]-4-hydroxy-2-pyrrolidinyl)methyl ester
gtattatcagctgagatgttt

SEQ ID NO: 921 - RNA, 21 nt, synthetic construct
  source 1..21: mol_type = other RNA
  modified_base 1: mod_base = OTHER; note = 2'-O-methylcytidine-3'-phosphorothioate
  modified_base 2: mod_base = OTHER; note = 2'-O-methyluridine-3'-phosphorothioate
  modified_base 3: mod_base = OTHER; note = 2'-O-methylcytidine-3'-phosphate
  modified_base 4: mod_base = OTHER; note = 2'-O-methyluridine-3'-phosphate
  modified_base 5: mod_base = OTHER; note = 2'-O-methyladenosine-3'-phosphate
  modified_base 6: mod_base = OTHER; note = 2'-O-methyluridine-3'-phosphate
  modified_base 7: mod_base = OTHER; note = 2'-deoxy-2'-fluoroadenosine-3'-phosphate
  modified_base 8: mod_base = OTHER; note = 2'-O-methylcytidine-3'-phosphate
  modified_base 9: mod_base = OTHER; note = 2'-deoxy-2'-fluorouridine-3'-phosphate
  modified_base 10: mod_base = OTHER; note = 2'-deoxy-2'-fluorocytidine-3'-phosphate
  modified_base 11: mod_base = OTHER; note = 2'-deoxy-2'-fluorouridine-3'-phosphate
  modified_base 12: mod_base = OTHER; note = 2'-O-methyladenosine-3'-phosphate
  modified_base 13: mod_base = OTHER; note = 2'-O-methylcytidine-3'-phosphate
  modified_base 14: mod_base = OTHER; note = 2'-O-methyladenosine-3'-phosphate
  modified_base 15: mod_base = OTHER; note = 2'-O-methylcytidine-3'-phosphate
  modified_base 16: mod_base = OTHER; note = 2'-O-methyladenosine-3'-phosphate
  modified_base 17: mod_base = OTHER; note = 2'-O-methylguanosine-3'-phosphate
  modified_base 18: mod_base = OTHER; note = 2'-O-methylcytidine-3'-phosphate
  modified_base 19: mod_base = OTHER; note = 2'-O-methyladenosine-3'-phosphate
  modified_base 20: mod_base = OTHER; note = 2'-O-methylguanosine-3'-phosphate
  modified_base 21: mod_base = OTHER; note = 2'-O-methyluridine-3'-phosphate ((2S,4R)-1-[29-[[2-(acetylamino)-2-deoxy-beta-D-galactopyra nosyl]oxy]-14,14-bis[[3-[[3-[[5-[[2-(acetylamino)-2-deoxy-b eta-D-galactopyranosyl]oxy]-1-oxopentyl]amino]propyl]amino] -3-oxopropoxy]methyl]-1,12,19,25-tetraoxo-16-oxa-13,20,24-t riazanonacos-1-yl]-4-hydroxy-2-pyrrolidinyl)methyl ester
ctctatactctacacagcagt

SEQ ID NO: 922 - RNA, 21 nt, synthetic construct
  source 1..21: mol_type = other RNA
  modified_base 1: mod_base = OTHER; note = 2'-O-methylcytidine-3'-phosphorothioate
  modified_base 2: mod_base = OTHER; note = 2'-O-methyluridine-3'-phosphorothioate
  modified_base 3: mod_base = OTHER; note = 2'-O-methylcytidine-3'-phosphate
  modified_base 4: mod_base = OTHER; note = 2'-O-methyluridine-3'-phosphate
  modified_base 5: mod_base = OTHER; note = 2'-O-methyladenosine-3'-phosphate
  modified_base 6: mod_base = OTHER; note = 2'-O-methylcytidine-3'-phosphate
  modified_base 7: mod_base = OTHER; note = 2'-deoxy-2'-fluoroadenosine-3'-phosphate
  modified_base 8: mod_base = OTHER; note = 2'-O-methylcytidine-3'-phosphate
  modified_base 9: mod_base = OTHER; note = 2'-deoxy-2'-fluoroadenosine-3'-phosphate
  modified_base 10: mod_base = OTHER; note = 2'-deoxy-2'-fluoroguanosine-3'-phosphate
  modified_base 11: mod_base = OTHER; note = 2'-deoxy-2'-fluorocytidine-3'-phosphate
  modified_base 12: mod_base = OTHER; note = 2'-O-methyladenosine-3'-phosphate
  modified_base 13: mod_base = OTHER; note = 2'-O-methylguanosine-3'-phosphate
  modified_base 14: mod_base = OTHER; note = 2'-O-methylcytidine-3'-phosphate
  modified_base 15: mod_base = OTHER; note = 2'-O-methylguanosine-3'-phosphate
  modified_base 16: mod_base = OTHER; note = 2'-O-methyluridine-3'-phosphate
  modified_base 17: mod_base = OTHER; note = 2'-O-methylguanosine-3'-phosphate
  modified_base 18: mod_base = OTHER; note = 2'-O-methyladenosine-3'-phosphate
  modified_base 19: mod_base = OTHER; note = 2'-O-methyladenosine-3'-phosphate
  modified_base 20: mod_base = OTHER; note = 2'-O-methyluridine-3'-phosphate
  modified_base 21: mod_base = OTHER; note = 2'-O-methyluridine-3'-phosphate ((2S,4R)-1-[29-[[2-(acetylamino)-2-deoxy-beta-D-galactopyra nosyl]oxy]-14,14-bis[[3-[[3-[[5-[[2-(acetylamino)-2-deoxy-b eta-D-galactopyranosyl]oxy]-1-oxopentyl]amino]propyl]amino] -3-oxopropoxy]methyl]-1,12,19,25-tetraoxo-16-oxa-13,20,24-t riazanonacos-1-yl]-4-hydroxy-2-pyrrolidinyl)methyl ester
ctctacacagcagcgtgaatt

SEQ ID NO: 923 - RNA, 21 nt, synthetic construct
  source 1..21: mol_type = other RNA
  modified_base 1: mod_base = OTHER; note = 2'-O-methyladenosine-3'-phosphorothioate
  modified_base 2: mod_base = OTHER; note = 2'-O-methylguanosine-3'-phosphorothioate
  modified_base 3: mod_base = OTHER; note = 2'-O-methylcytidine-3'-phosphate
  modified_base 4: mod_base = OTHER; note = 2'-O-methyladenosine-3'-phosphate
  modified_base 5: mod_base = OTHER; note = 2'-O-methylguanosine-3'-phosphate
  modified_base 6: mod_base = OTHER; note = 2'-O-methylcytidine-3'-phosphate
  modified_base 7: mod_base = OTHER; note = 2'-deoxy-2'-fluoroguanosine-3'-phosphate
  modified_base 8: mod_base = OTHER; note = 2'-O-methyluridine-3'-phosphate
  modified_base 9: mod_base = OTHER; note = 2'-deoxy-2'-fluoroguanosine-3'-phosphate
  modified_base 10: mod_base = OTHER; note = 2'-deoxy-2'-fluoroadenosine-3'-phosphate
  modified_base 11: mod_base = OTHER; note = 2'-deoxy-2'-fluoroadenosine-3'-phosphate
  modified_base 12: mod_base = OTHER; note = 2'-O-methyluridine-3'-phosphate
  modified_base 13: mod_base = OTHER; note = 2'-O-methylguanosine-3'-phosphate
  modified_base 14: mod_base = OTHER; note = 2'-O-methyladenosine-3'-phosphate
  modified_base 15: mod_base = OTHER; note = 2'-O-methyluridine-3'-phosphate
  modified_base 16: mod_base = OTHER; note = 2'-O-methyladenosine-3'-phosphate
  modified_base 17: mod_base = OTHER; note = 2'-O-methyladenosine-3'-phosphate
  modified_base 18: mod_base = OTHER; note = 2'-O-methyladenosine-3'-phosphate
  modified_base 19: mod_base = OTHER; note = 2'-O-methylguanosine-3'-phosphate
  modified_base 20: mod_base = OTHER; note = 2'-O-methylguanosine-3'-phosphate
  modified_base 21: mod_base = OTHER; note = 2'-O-methyluridine-3'-phosphate ((2S,4R)-1-[29-[[2-(acetylamino)-2-deoxy-beta-D-galactopyra nosyl]oxy]-14,14-bis[[3-[[3-[[5-[[2-(acetylamino)-2-deoxy-b eta-D-galactopyranosyl]oxy]-1-oxopentyl]amino]propyl]amino] -3-oxopropoxy]methyl]-1,12,19,25-tetraoxo-16-oxa-13,20,24-t riazanonacos-1-yl]-4-hydroxy-2-pyrrolidinyl)methyl ester
agcagcgtgaatgataaaggt

SEQ ID NO: 924 - RNA, 21 nt, synthetic construct
  source 1..21: mol_type = other RNA
  modified_base 1: mod_base = OTHER; note = 2'-O-methyladenosine-3'-phosphorothioate
  modified_base 2: mod_base = OTHER; note = 2'-O-methyladenosine-3'-phosphorothioate
  modified_base 3: mod_base = OTHER; note = 2'-O-methyluridine-3'-phosphate
  modified_base 4: mod_base = OTHER; note = 2'-O-methylguanosine-3'-phosphate
  modified_base 5: mod_base = OTHER; note = 2'-O-methyladenosine-3'-phosphate
  modified_base 6: mod_base = OTHER; note = 2'-O-methyluridine-3'-phosphate
  modified_base 7: mod_base = OTHER; note = 2'-deoxy-2'-fluoroadenosine-3'-phosphate
  modified_base 8: mod_base = OTHER; note = 2'-O-methyladenosine-3'-phosphate
  modified_base 9: mod_base = OTHER; note = 2'-deoxy-2'-fluoroadenosine-3'-phosphate
  modified_base 10: mod_base = OTHER; note = 2'-deoxy-2'-fluoroguanosine-3'-phosphate
  modified_base 11: mod_base = OTHER; note = 2'-deoxy-2'-fluoroguanosine-3'-phosphate
  modified_base 12: mod_base = OTHER; note = 2'-O-methylguanosine-3'-phosphate
  modified_base 13: mod_base = OTHER; note = 2'-O-methylcytidine-3'-phosphate
  modified_base 14: mod_base = OTHER; note = 2'-O-methyluridine-3'-phosphate
  modified_base 15: mod_base = OTHER; note = 2'-O-methylguanosine-3'-phosphate
  modified_base 16: mod_base = OTHER; note = 2'-O-methyladenosine-3'-phosphate
  modified_base 17: mod_base = OTHER; note = 2'-O-methylguanosine-3'-phosphate
  modified_base 18: mod_base = OTHER; note = 2'-O-methyladenosine-3'-phosphate
  modified_base 19: mod_base = OTHER; note = 2'-O-methylguanosine-3'-phosphate
  modified_base 20: mod_base = OTHER; note = 2'-O-methyluridine-3'-phosphate
  modified_base 21: mod_base = OTHER; note = 2'-O-methyluridine-3'-phosphate ((2S,4R)-1-[29-[[2-(acetylamino)-2-deoxy-beta-D-galactopyra nosyl]oxy]-14,14-bis[[3-[[3-[[5-[[2-(acetylamino)-2-deoxy-b eta-D-galactopyranosyl]oxy]-1-oxopentyl]amino]propyl]amino] -3-oxopropoxy]methyl]-1,12,19,25-tetraoxo-16-oxa-13,20,24-t riazanonacos-1-yl]-4-hydroxy-2-pyrrolidinyl)methyl ester
aatgataaagggctgagagtt

SEQ ID NO: 925 - RNA, 21 nt, synthetic construct
  source 1..21: mol_type = other RNA
  modified_base 1: mod_base = OTHER; note = 2'-O-methylguanosine-3'-phosphorothioate
  modified_base 2: mod_base = OTHER; note = 2'-O-methylguanosine-3'-phosphorothioate
  modified_base 3: mod_base = OTHER; note = 2'-O-methylguanosine-3'-phosphate
  modified_base 4: mod_base = OTHER; note = 2'-O-methylcytidine-3'-phosphate
  modified_base 5: mod_base = OTHER; note = 2'-O-methyluridine-3'-phosphate
  modified_base 6: mod_base = OTHER; note = 2'-O-methylguanosine-3'-phosphate
  modified_base 7: mod_base = OTHER; note = 2'-deoxy-2'-fluoroadenosine-3'-phosphate
  modified_base 8: mod_base = OTHER; note = 2'-O-methylguanosine-3'-phosphate
  modified_base 9: mod_base = OTHER; note = 2'-deoxy-2'-fluoroadenosine-3'-phosphate
  modified_base 10: mod_base = OTHER; note = 2'-deoxy-2'-fluoroguanosine-3'-phosphate
  modified_base 11: mod_base = OTHER; note = 2'-deoxy-2'-fluorouridine-3'-phosphate
  modified_base 12: mod_base = OTHER; note = 2'-O-methylcytidine-3'-phosphate
  modified_base 13: mod_base = OTHER; note = 2'-O-methylcytidine-3'-phosphate
  modified_base 14: mod_base = OTHER; note = 2'-O-methyluridine-3'-phosphate
  modified_base 15: mod_base = OTHER; note = 2'-O-methylguanosine-3'-phosphate
  modified_base 16: mod_base = OTHER; note = 2'-O-methylguanosine-3'-phosphate
  modified_base 17: mod_base = OTHER; note = 2'-O-methyladenosine-3'-phosphate
  modified_base 18: mod_base = OTHER; note = 2'-O-methyladenosine-3'-phosphate
  modified_base 19: mod_base = OTHER; note = 2'-O-methylguanosine-3'-phosphate
  modified_base 20: mod_base = OTHER; note = 2'-O-methyladenosine-3'-phosphate
  modified_base 21: mod_base = OTHER; note = 2'-O-methyluridine-3'-phosphate ((2S,4R)-1-[29-[[2-(acetylamino)-2-deoxy-beta-D-galactopyra nosyl]oxy]-14,14-bis[[3-[[3-[[5-[[2-(acetylamino)-2-deoxy-b eta-D-galactopyranosyl]oxy]-1-oxopentyl]amino]propyl]amino] -3-oxopropoxy]methyl]-1,12,19,25-tetraoxo-16-oxa-13,20,24-t riazanonacos-1-yl]-4-hydroxy-2-pyrrolidinyl)methyl ester
gggctgagagtcctggaagat

SEQ ID NO: 926 - RNA, 21 nt, synthetic construct
  source 1..21: mol_type = other RNA
  modified_base 1: mod_base = OTHER; note = 2'-O-methyladenosine-3'-phosphorothioate
  modified_base 2: mod_base = OTHER; note = 2'-O-methylguanosine-3'-phosphorothioate
  modified_base 3: mod_base = OTHER; note = 2'-O-methyluridine-3'-phosphate
  modified_base 4: mod_base = OTHER; note = 2'-O-methylcytidine-3'-phosphate
  modified_base 5: mod_base = OTHER; note = 2'-O-methylcytidine-3'-phosphate
  modified_base 6: mod_base = OTHER; note = 2'-O-methyluridine-3'-phosphate
  modified_base 7: mod_base = OTHER; note = 2'-deoxy-2'-fluoroguanosine-3'-phosphate
  modified_base 8: mod_base = OTHER; note = 2'-O-methylguanosine-3'-phosphate
  modified_base 9: mod_base = OTHER; note = 2'-deoxy-2'-fluoroadenosine-3'-phosphate
  modified_base 10: mod_base = OTHER; note = 2'-deoxy-2'-fluoroadenosine-3'-phosphate
  modified_base 11: mod_base = OTHER; note = 2'-deoxy-2'-fluoroguanosine-3'-phosphate
  modified_base 12: mod_base = OTHER; note = 2'-O-methyladenosine-3'-phosphate
  modified_base 13: mod_base = OTHER; note = 2'-O-methylcytidine-3'-phosphate
  modified_base 14: mod_base = OTHER; note = 2'-O-methyladenosine-3'-phosphate
  modified_base 15: mod_base = OTHER; note = 2'-O-methyladenosine-3'-phosphate
  modified_base 16: mod_base = OTHER; note = 2'-O-methyluridine-3'-phosphate
  modified_base 17: mod_base = OTHER; note = 2'-O-methyluridine-3'-phosphate
  modified_base 18: mod_base = OTHER; note = 2'-O-methylcytidine-3'-phosphate
  modified_base 19: mod_base = OTHER; note = 2'-O-methyladenosine-3'-phosphate
  modified_base 20: mod_base = OTHER; note = 2'-O-methylguanosine-3'-phosphate
  modified_base 21: mod_base = OTHER; note = 2'-O-methyluridine-3'-phosphate ((2S,4R)-1-[29-[[2-(acetylamino)-2-deoxy-beta-D-galactopyra nosyl]oxy]-14,14-bis[[3-[[3-[[5-[[2-(acetylamino)-2-deoxy-b eta-D-galactopyranosyl]oxy]-1-oxopentyl]amino]propyl]amino] -3-oxopropoxy]methyl]-1,12,19,25-tetraoxo-16-oxa-13,20,24-t riazanonacos-1-yl]-4-hydroxy-2-pyrrolidinyl)methyl ester
agtcctggaagacaattcagt

SEQ ID NO: 927 - RNA, 21 nt, synthetic construct
  source 1..21: mol_type = other RNA
  modified_base 1: mod_base = OTHER; note = 2'-O-methyladenosine-3'-phosphorothioate
  modified_base 2: mod_base = OTHER; note = 2'-O-methyladenosine-3'-phosphorothioate
  modified_base 3: mod_base = OTHER; note = 2'-O-methylguanosine-3'-phosphate
  modified_base 4: mod_base = OTHER; note = 2'-O-methyladenosine-3'-phosphate
  modified_base 5: mod_base = OTHER; note = 2'-O-methylcytidine-3'-phosphate
  modified_base 6: mod_base = OTHER; note = 2'-O-methyladenosine-3'-phosphate
  modified_base 7: mod_base = OTHER; note = 2'-deoxy-2'-fluoroadenosine-3'-phosphate
  modified_base 8: mod_base = OTHER; note = 2'-O-methyluridine-3'-phosphate
  modified_base 9: mod_base = OTHER; note = 2'-deoxy-2'-fluorouridine-3'-phosphate
  modified_base 10: mod_base = OTHER; note = 2'-deoxy-2'-fluorocytidine-3'-phosphate
  modified_base 11: mod_base = OTHER; note = 2'-deoxy-2'-fluoroadenosine-3'-phosphate
  modified_base 12: mod_base = OTHER; note = 2'-O-methylguanosine-3'-phosphate
  modified_base 13: mod_base = OTHER; note = 2'-O-methylcytidine-3'-phosphate
  modified_base 14: mod_base = OTHER; note = 2'-O-methyluridine-3'-phosphate
  modified_base 15: mod_base = OTHER; note = 2'-O-methyluridine-3'-phosphate
  modified_base 16: mod_base = OTHER; note = 2'-O-methyluridine-3'-phosphate
  modified_base 17: mod_base = OTHER; note = 2'-O-methylguanosine-3'-phosphate
  modified_base 18: mod_base = OTHER; note = 2'-O-methylguanosine-3'-phosphate
  modified_base 19: mod_base = OTHER; note = 2'-O-methyladenosine-3'-phosphate
  modified_base 20: mod_base = OTHER; note = 2'-O-methyluridine-3'-phosphate
  modified_base 21: mod_base = OTHER; note = 2'-O-methyluridine-3'-phosphate ((2S,4R)-1-[29-[[2-(acetylamino)-2-deoxy-beta-D-galactopyra nosyl]oxy]-14,14-bis[[3-[[3-[[5-[[2-(acetylamino)-2-deoxy-b eta-D-galactopyranosyl]oxy]-1-oxopentyl]amino]propyl]amino] -3-oxopropoxy]methyl]-1,12,19,25-tetraoxo-16-oxa-13,20,24-t riazanonacos-1-yl]-4-hydroxy-2-pyrrolidinyl)methyl ester
aagacaattcagctttggatt

SEQ ID NO: 928 - RNA, 21 nt, synthetic construct
  source 1..21: mol_type = other RNA
  modified_base 1: mod_base = OTHER; note = 2'-O-methyluridine-3'-phosphorothioate
  modified_base 2: mod_base = OTHER; note = 2'-O-methylcytidine-3'-phosphorothioate
  modified_base 3: mod_base = OTHER; note = 2'-O-methyladenosine-3'-phosphate
  modified_base 4: mod_base = OTHER; note = 2'-O-methylguanosine-3'-phosphate
  modified_base 5: mod_base = OTHER; note = 2'-O-methylcytidine-3'-phosphate
  modified_base 6: mod_base = OTHER; note = 2'-O-methyluridine-3'-phosphate
  modified_base 7: mod_base = OTHER; note = 2'-deoxy-2'-fluorouridine-3'-phosphate
  modified_base 8: mod_base = OTHER; note = 2'-O-methyluridine-3'-phosphate
  modified_base 9: mod_base = OTHER; note = 2'-deoxy-2'-fluoroguanosine-3'-phosphate
  modified_base 10: mod_base = OTHER; note = 2'-deoxy-2'-fluoroguanosine-3'-phosphate
  modified_base 11: mod_base = OTHER; note = 2'-deoxy-2'-fluoroadenosine-3'-phosphate
  modified_base 12: mod_base = OTHER; note = 2'-O-methyluridine-3'-phosphate
  modified_base 13: mod_base = OTHER; note = 2'-O-methyladenosine-3'-phosphate
  modified_base 14: mod_base = OTHER; note = 2'-O-methyladenosine-3'-phosphate
  modified_base 15: mod_base = OTHER; note = 2'-O-methyladenosine-3'-phosphate
  modified_base 16: mod_base = OTHER; note = 2'-O-methyladenosine-3'-phosphate
  modified_base 17: mod_base = OTHER; note = 2'-O-methyluridine-3'-phosphate
  modified_base 18: mod_base = OTHER; note = 2'-O-methylguanosine-3'-phosphate
  modified_base 19: mod_base = OTHER; note = 2'-O-methylcytidine-3'-phosphate
  modified_base 20: mod_base = OTHER; note = 2'-O-methyluridine-3'-phosphate
  modified_base 21: mod_base = OTHER; note = 2'-O-methyluridine-3'-phosphate ((2S,4R)-1-[29-[[2-(acetylamino)-2-deoxy-beta-D-galactopyra nosyl]oxy]-14,14-bis[[3-[[3-[[5-[[2-(acetylamino)-2-deoxy-b eta-D-galactopyranosyl]oxy]-1-oxopentyl]amino]propyl]amino] -3-oxopropoxy]methyl]-1,12,19,25-tetraoxo-16-oxa-13,20,24-t riazanonacos-1-yl]-4-hydroxy-2-pyrrolidinyl)methyl ester
tcagctttggataaaatgctt

SEQ ID NO: 929 - RNA, 21 nt, synthetic construct
  source 1..21: mol_type = other RNA
  modified_base 1: mod_base = OTHER; note = 2'-O-methylguanosine-3'-phosphorothioate
  modified_base 2: mod_base = OTHER; note = 2'-O-methyladenosine-3'-phosphorothioate
  modified_base 3: mod_base = OTHER; note = 2'-O-methyluridine-3'-phosphate
  modified_base 4: mod_base = OTHER; note = 2'-O-methyladenosine-3'-phosphate
  modified_base 5: mod_base = OTHER; note = 2'-O-methyladenosine-3'-phosphate
  modified_base 6: mod_base = OTHER; note = 2'-O-methyladenosine-3'-phosphate
  modified_base 7: mod_base = OTHER; note = 2'-deoxy-2'-fluoroadenosine-3'-phosphate
  modified_base 8: mod_base = OTHER; note = 2'-O-methyluridine-3'-phosphate
  modified_base 9: mod_base = OTHER; note = 2'-deoxy-2'-fluoroguanosine-3'-phosphate
  modified_base 10: mod_base = OTHER; note = 2'-deoxy-2'-fluorocytidine-3'-phosphate
  modified_base 11: mod_base = OTHER; note = 2'-deoxy-2'-fluorouridine-3'-phosphate
  modified_base 12: mod_base = OTHER; note = 2'-O-methylguanosine-3'-phosphate
  modified_base 13: mod_base = OTHER; note = 2'-O-methylcytidine-3'-phosphate
  modified_base 14: mod_base = OTHER; note = 2'-O-methyladenosine-3'-phosphate
  modified_base 15: mod_base = OTHER; note = 2'-O-methylguanosine-3'-phosphate
  modified_base 16: mod_base = OTHER; note = 2'-O-methyladenosine-3'-phosphate
  modified_base 17: mod_base = OTHER; note = 2'-O-methyladenosine-3'-phosphate
  modified_base 18: mod_base = OTHER; note = 2'-O-methyluridine-3'-phosphate
  modified_base 19: mod_base = OTHER; note = 2'-O-methylguanosine-3'-phosphate
  modified_base 20: mod_base = OTHER; note = 2'-O-methyluridine-3'-phosphate
  modified_base 21: mod_base = OTHER; note = 2'-O-methyluridine-3'-phosphate ((2S,4R)-1-[29-[[2-(acetylamino)-2-deoxy-beta-D-galactopyra nosyl]oxy]-14,14-bis[[3-[[3-[[5-[[2-(acetylamino)-2-deoxy-b eta-D-galactopyranosyl]oxy]-1-oxopentyl]amino]propyl]amino] -3-oxopropoxy]methyl]-1,12,19,25-tetraoxo-16-oxa-13,20,24-t riazanonacos-1-yl]-4-hydroxy-2-pyrrolidinyl)methyl ester
gataaaatgctgcagaatgtt

SEQ ID NO: 930 - RNA, 21 nt, synthetic construct
  source 1..21: mol_type = other RNA
  modified_base 1: mod_base = OTHER; note = 2'-O-methyladenosine-3'-phosphorothioate
  modified_base 2: mod_base = OTHER; note = 2'-O-methyluridine-3'-phosphorothioate
  modified_base 3: mod_base = OTHER; note = 2'-O-methylguanosine-3'-phosphate
  modified_base 4: mod_base = OTHER; note = 2'-O-methylcytidine-3'-phosphate
  modified_base 5: mod_base = OTHER; note = 2'-O-methyluridine-3'-phosphate
  modified_base 6: mod_base = OTHER; note = 2'-O-methylguanosine-3'-phosphate
  modified_base 7: mod_base = OTHER; note = 2'-deoxy-2'-fluorocytidine-3'-phosphate
  modified_base 8: mod_base = OTHER; note = 2'-O-methyladenosine-3'-phosphate
  modified_base 9: mod_base = OTHER; note = 2'-deoxy-2'-fluoroguanosine-3'-phosphate
  modified_base 10: mod_base = OTHER; note = 2'-deoxy-2'-fluoroadenosine-3'-phosphate
  modified_base 11: mod_base = OTHER; note = 2'-deoxy-2'-fluoroadenosine-3'-phosphate
  modified_base 12: mod_base = OTHER; note = 2'-O-methyluridine-3'-phosphate
  modified_base 13: mod_base = OTHER; note = 2'-O-methylguanosine-3'-phosphate
  modified_base 14: mod_base = OTHER; note = 2'-O-methyluridine-3'-phosphate
  modified_base 15: mod_base = OTHER; note = 2'-O-methylcytidine-3'-phosphate
  modified_base 16: mod_base = OTHER; note = 2'-O-methylcytidine-3'-phosphate
  modified_base 17: mod_base = OTHER; note = 2'-O-methyladenosine-3'-phosphate
  modified_base 18: mod_base = OTHER; note = 2'-O-methylguanosine-3'-phosphate
  modified_base 19: mod_base = OTHER; note = 2'-O-methyladenosine-3'-phosphate
  modified_base 20: mod_base = OTHER; note = 2'-O-methyluridine-3'-phosphate
  modified_base 21: mod_base = OTHER; note = 2'-O-methyluridine-3'-phosphate ((2S,4R)-1-[29-[[2-(acetylamino)-2-deoxy-beta-D-galactopyra nosyl]oxy]-14,14-bis[[3-[[3-[[5-[[2-(acetylamino)-2-deoxy-b eta-D-galactopyranosyl]oxy]-1-oxopentyl]amino]propyl]amino] -3-oxopropoxy]methyl]-1,12,19,25-tetraoxo-16-oxa-13,20,24-t riazanonacos-1-yl]-4-hydroxy-2-pyrrolidinyl)methyl ester
atgctgcagaatgtccagatt

SEQ ID NO: 931 - RNA, 21 nt, synthetic construct
  source 1..21: mol_type = other RNA
  modified_base 1: mod_base = OTHER; note = 2'-O-methylcytidine-3'-phosphorothioate
  modified_base 2: mod_base = OTHER; note = 2'-O-methyluridine-3'-phosphorothioate
  modified_base 3: mod_base = OTHER; note = 2'-O-methylguanosine-3'-phosphate
  modified_base 4: mod_base = OTHER; note = 2'-O-methylguanosine-3'-phosphate
  modified_base 5: mod_base = OTHER; note = 2'-O-methyladenosine-3'-phosphate
  modified_base 6: mod_base = OTHER; note = 2'-O-methylcytidine-3'-phosphate
  modified_base 7: mod_base = OTHER; note = 2'-deoxy-2'-fluorouridine-3'-phosphate
  modified_base 8: mod_base = OTHER; note = 2'-O-methyluridine-3'-phosphate
  modified_base 9: mod_base = OTHER; note = 2'-deoxy-2'-fluorocytidine-3'-phosphate
  modified_base 10: mod_base = OTHER; note = 2'-deoxy-2'-fluoroadenosine-3'-phosphate
  modified_base 11: mod_base = OTHER; note = 2'-deoxy-2'-fluorouridine-3'-phosphate
  modified_base 12: mod_base = OTHER; note = 2'-O-methyluridine-3'-phosphate
  modified_base 13: mod_base = OTHER; note = 2'-O-methyladenosine-3'-phosphate
  modified_base 14: mod_base = OTHER; note = 2'-O-methyluridine-3'-phosphate
  modified_base 15: mod_base = OTHER; note = 2'-O-methyluridine-3'-phosphate
  modified_base 16: mod_base = OTHER; note = 2'-O-methyluridine-3'-phosphate
  modified_base 17: mod_base = OTHER; note = 2'-O-methyluridine-3'-phosphate
  modified_base 18: mod_base = OTHER; note = 2'-O-methylguanosine-3'-phosphate
  modified_base 19: mod_base = OTHER; note = 2'-O-methyladenosine-3'-phosphate
  modified_base 20: mod_base = OTHER; note = 2'-O-methyladenosine-3'-phosphate
  modified_base 21: mod_base = OTHER; note = 2'-O-methyluridine-3'-phosphate ((2S,4R)-1-[29-[[2-(acetylamino)-2-deoxy-beta-D-galactopyra nosyl]oxy]-14,14-bis[[3-[[3-[[5-[[2-(acetylamino)-2-deoxy-b eta-D-galactopyranosyl]oxy]-1-oxopentyl]amino]propyl]amino] -3-oxopropoxy]methyl]-1,12,19,25-tetraoxo-16-oxa-13,20,24-t riazanonacos-1-yl]-4-hydroxy-2-pyrrolidinyl)methyl ester
ctggacttcattattttgaat

SEQ ID NO: 932 - RNA, 21 nt, synthetic construct
  source 1..21: mol_type = other RNA
  modified_base 1: mod_base = OTHER; note = 2'-O-methyladenosine-3'-phosphorothioate
  modified_base 2: mod_base = OTHER; note = 2'-O-methyladenosine-3'-phosphorothioate
  modified_base 3: mod_base = OTHER; note = 2'-O-methyladenosine-3'-phosphate
  modified_base 4: mod_base = OTHER; note = 2'-O-methylcytidine-3'-phosphate
  modified_base 5: mod_base = OTHER; note = 2'-O-methyladenosine-3'-phosphate
  modified_base 6: mod_base = OTHER; note = 2'-O-methyladenosine-3'-phosphate
  modified_base 7: mod_base = OTHER; note = 2'-deoxy-2'-fluoroadenosine-3'-phosphate
  modified_base 8: mod_base = OTHER; note = 2'-O-methyladenosine-3'-phosphate
  modified_base 9: mod_base = OTHER; note = 2'-deoxy-2'-fluorouridine-3'-phosphate
  modified_base 10: mod_base = OTHER; note = 2'-deoxy-2'-fluorouridine-3'-phosphate
  modified_base 11: mod_base = OTHER; note = 2'-deoxy-2'-fluorouridine-3'-phosphate
  modified_base 12: mod_base = OTHER; note = 2'-O-methyluridine-3'-phosphate
  modified_base 13: mod_base = OTHER; note = 2'-O-methylguanosine-3'-phosphate
  modified_base 14: mod_base = OTHER; note = 2'-O-methylguanosine-3'-phosphate
  modified_base 15: mod_base = OTHER; note = 2'-O-methyluridine-3'-phosphate
  modified_base 16: mod_base = OTHER; note = 2'-O-methyladenosine-3'-phosphate
  modified_base 17: mod_base = OTHER; note = 2'-O-methyluridine-3'-phosphate
  modified_base 18: mod_base = OTHER; note = 2'-O-methylcytidine-3'-phosphate
  modified_base 19: mod_base = OTHER; note = 2'-O-methyladenosine-3'-phosphate
  modified_base 20: mod_base = OTHER; note = 2'-O-methylguanosine-3'-phosphate
  modified_base 21: mod_base = OTHER; note = 2'-O-methyluridine-3'-phosphate ((2S,4R)-1-[29-[[2-(acetylamino)-2-deoxy-beta-D-galactopyra nosyl]oxy]-14,14-bis[[3-[[3-[[5-[[2-(acetylamino)-2-deoxy-b eta-D-galactopyranosyl]oxy]-1-oxopentyl]amino]propyl]amino] -3-oxopropoxy]methyl]-1,12,19,25-tetraoxo-16-oxa-13,20,24-t riazanonacos-1-yl]-4-hydroxy-2-pyrrolidinyl)methyl ester
aaacaaaattttggtatcagt

SEQ ID NO: 933 - RNA, 21 nt, synthetic construct
  source 1..21: mol_type = other RNA
  modified_base 1: mod_base = OTHER; note = 2'-O-methyluridine-3'-phosphorothioate
  modified_base 2: mod_base = OTHER; note = 2'-O-methyluridine-3'-phosphorothioate
  modified_base 3: mod_base = OTHER; note = 2'-O-methylguanosine-3'-phosphate
  modified_base 4: mod_base = OTHER; note = 2'-O-methylguanosine-3'-phosphate
  modified_base 5: mod_base = OTHER; note = 2'-O-methyluridine-3'-phosphate
  modified_base 6: mod_base = OTHER; note = 2'-O-methyladenosine-3'-phosphate
  modified_base 7: mod_base = OTHER; note = 2'-deoxy-2'-fluorouridine-3'-phosphate
  modified_base 8: mod_base = OTHER; note = 2'-O-methylcytidine-3'-phosphate
  modified_base 9: mod_base = OTHER; note = 2'-deoxy-2'-fluoroadenosine-3'-phosphate
  modified_base 10: mod_base = OTHER; note = 2'-deoxy-2'-fluoroguanosine-3'-phosphate
  modified_base 11: mod_base = OTHER; note = 2'-deoxy-2'-fluoroadenosine-3'-phosphate
  modified_base 12: mod_base = OTHER; note = 2'-O-methyluridine-3'-phosphate
  modified_base 13: mod_base = OTHER; note = 2'-O-methylguanosine-3'-phosphate
  modified_base 14: mod_base = OTHER; note = 2'-O-methyladenosine-3'-phosphate
  modified_base 15: mod_base = OTHER; note = 2'-O-methyluridine-3'-phosphate
  modified_base 16: mod_base = OTHER; note = 2'-O-methylcytidine-3'-phosphate
  modified_base 17: mod_base = OTHER; note = 2'-O-methyluridine-3'-phosphate
  modified_base 18: mod_base = OTHER; note = 2'-O-methyluridine-3'-phosphate
  modified_base 19: mod_base = OTHER; note = 2'-O-methylguanosine-3'-phosphate
  modified_base 20: mod_base = OTHER; note = 2'-O-methylcytidine-3'-phosphate
  modified_base 21: mod_base = OTHER; note = 2'-O-methyluridine-3'-phosphate ((2S,4R)-1-[29-[[2-(acetylamino)-2-deoxy-beta-D-galactopyra nosyl]oxy]-14,14-bis[[3-[[3-[[5-[[2-(acetylamino)-2-deoxy-b eta-D-galactopyranosyl]oxy]-1-oxopentyl]amino]propyl]amino] -3-oxopropoxy]methyl]-1,12,19,25-tetraoxo-16-oxa-13,20,24-t riazanonacos-1-yl]-4-hydroxy-2-pyrrolidinyl)methyl ester
ttggtatcagatgatcttgct

SEQ ID NO: 934 - RNA, 21 nt, synthetic construct
  source 1..21: mol_type = other RNA
  modified_base 1: mod_base = OTHER; note = 2'-O-methylcytidine-3'-phosphorothioate
  modified_base 2: mod_base = OTHER; note = 2'-O-methyladenosine-3'-phosphorothioate
  modified_base 3: mod_base = OTHER; note = 2'-O-methylguanosine-3'-phosphate
  modified_base 4: mod_base = OTHER; note = 2'-O-methyladenosine-3'-phosphate
  modified_base 5: mod_base = OTHER; note = 2'-O-methyluridine-3'-phosphate
  modified_base 6: mod_base = OTHER; note = 2'-O-methylguanosine-3'-phosphate
  modified_base 7: mod_base = OTHER; note = 2'-deoxy-2'-fluoroadenosine-3'-phosphate
  modified_base 8: mod_base = OTHER; note = 2'-O-methyluridine-3'-phosphate
  modified_base 9: mod_base = OTHER; note = 2'-deoxy-2'-fluorocytidine-3'-phosphate
  modified_base 10: mod_base = OTHER; note = 2'-deoxy-2'-fluorouridine-3'-phosphate
  modified_base 11: mod_base = OTHER; note = 2'-deoxy-2'-fluorouridine-3'-phosphate
  modified_base 12: mod_base = OTHER; note = 2'-O-methylguanosine-3'-phosphate
  modified_base 13: mod_base = OTHER; note = 2'-O-methylcytidine-3'-phosphate
  modified_base 14: mod_base = OTHER; note = 2'-O-methylcytidine-3'-phosphate
  modified_base 15: mod_base = OTHER; note = 2'-O-methyluridine-3'-phosphate
  modified_base 16: mod_base = OTHER; note = 2'-O-methylcytidine-3'-phosphate
  modified_base 17: mod_base = OTHER; note = 2'-O-methylcytidine-3'-phosphate
  modified_base 18: mod_base = OTHER; note = 2'-O-methyluridine-3'-phosphate
  modified_base 19: mod_base = OTHER; note = 2'-O-methylcytidine-3'-phosphate
  modified_base 20: mod_base = OTHER; note = 2'-O-methyladenosine-3'-phosphate
  modified_base 21: mod_base = OTHER; note = 2'-O-methyluridine-3'-phosphate ((2S,4R)-1-[29-[[2-(acetylamino)-2-deoxy-beta-D-galactopyra nosyl]oxy]-14,14-bis[[3-[[3-[[5-[[2-(acetylamino)-2-deoxy-b eta-D-galactopyranosyl]oxy]-1-oxopentyl]amino]propyl]amino] -3-oxopropoxy]methyl]-1,12,19,25-tetraoxo-16-oxa-13,20,24-t riazanonacos-1-yl]-4-hydroxy-2-pyrrolidinyl)methyl ester
cagatgatcttgcctcctcat

SEQ ID NO: 935 - RNA, 21 nt, synthetic construct
  source 1..21: mol_type = other RNA
  modified_base 1: mod_base = OTHER; note = 2'-O-methyladenosine-3'-phosphorothioate
  modified_base 2: mod_base = OTHER; note = 2'-O-methyluridine-3'-phosphorothioate
  modified_base 3: mod_base = OTHER; note = 2'-O-methylcytidine-3'-phosphate
  modified_base 4: mod_base = OTHER; note = 2'-O-methyluridine-3'-phosphate
  modified_base 5: mod_base = OTHER; note = 2'-O-methyluridine-3'-phosphate
  modified_base 6: mod_base = OTHER; note = 2'-O-methylguanosine-3'-phosphate
  modified_base 7: mod_base = OTHER; note = 2'-deoxy-2'-fluorocytidine-3'-phosphate
  modified_base 8: mod_base = OTHER; note = 2'-O-methylcytidine-3'-phosphate
  modified_base 9: mod_base = OTHER; note = 2'-deoxy-2'-fluorouridine-3'-phosphate
  modified_base 10: mod_base = OTHER; note = 2'-deoxy-2'-fluorocytidine-3'-phosphate
  modified_base 11: mod_base = OTHER; note = 2'-deoxy-2'-fluorocytidine-3'-phosphate
  modified_base 12: mod_base = OTHER; note = 2'-O-methyluridine-3'-phosphate
  modified_base 13: mod_base = OTHER; note = 2'-O-methylcytidine-3'-phosphate
  modified_base 14: mod_base = OTHER; note = 2'-O-methyladenosine-3'-phosphate
  modified_base 15: mod_base = OTHER; note = 2'-O-methyluridine-3'-phosphate
  modified_base 16: mod_base = OTHER; note = 2'-O-methyluridine-3'-phosphate
  modified_base 17: mod_base = OTHER; note = 2'-O-methyluridine-3'-phosphate
  modified_base 18: mod_base = OTHER; note = 2'-O-methyluridine-3'-phosphate
  modified_base 19: mod_base = OTHER; note = 2'-O-methylguanosine-3'-phosphate
  modified_base 20: mod_base = OTHER; note = 2'-O-methyladenosine-3'-phosphate
  modified_base 21: mod_base = OTHER; note = 2'-O-methyluridine-3'-phosphate ((2S,4R)-1-[29-[[2-(acetylamino)-2-deoxy-beta-D-galactopyra nosyl]oxy]-14,14-bis[[3-[[3-[[5-[[2-(acetylamino)-2-deoxy-b eta-D-galactopyranosyl]oxy]-1-oxopentyl]amino]propyl]amino] -3-oxopropoxy]methyl]-1,12,19,25-tetraoxo-16-oxa-13,20,24-t riazanonacos-1-yl]-4-hydroxy-2-pyrrolidinyl)methyl ester
atcttgcctcctcattttgat

SEQ ID NO: 936 - RNA, 21 nt, synthetic construct
  source 1..21: mol_type = other RNA
  modified_base 1: mod_base = OTHER; note = 2'-O-methylcytidine-3'-phosphorothioate
  modified_base 2: mod_base = OTHER; note = 2'-O-methylcytidine-3'-phosphorothioate
  modified_base 3: mod_base = OTHER; note = 2'-O-methyluridine-3'-phosphate
  modified_base 4: mod_base = OTHER; note = 2'-O-methylcytidine-3'-phosphate
  modified_base 5: mod_base = OTHER; note = 2'-O-methylcytidine-3'-phosphate
  modified_base 6: mod_base = OTHER; note = 2'-O-methyluridine-3'-phosphate
  modified_base 7: mod_base = OTHER; note = 2'-deoxy-2'-fluorocytidine-3'-phosphate
  modified_base 8: mod_base = OTHER; note = 2'-O-methyladenosine-3'-phosphate
  modified_base 9: mod_base = OTHER; note = 2'-deoxy-2'-fluorouridine-3'-phosphate
  modified_base 10: mod_base = OTHER; note = 2'-deoxy-2'-fluorouridine-3'-phosphate
  modified_base 11: mod_base = OTHER; note = 2'-deoxy-2'-fluorouridine-3'-phosphate
  modified_base 12: mod_base = OTHER; note = 2'-O-methyluridine-3'-phosphate
  modified_base 13: mod_base = OTHER; note = 2'-O-methylguanosine-3'-phosphate
  modified_base 14: mod_base = OTHER; note = 2'-O-methyladenosine-3'-phosphate
  modified_base 15: mod_base = OTHER; note = 2'-O-methyluridine-3'-phosphate
  modified_base 16: mod_base = OTHER; note = 2'-O-methyladenosine-3'-phosphate
  modified_base 17: mod_base = OTHER; note = 2'-O-methyladenosine-3'-phosphate
  modified_base 18: mod_base = OTHER; note = 2'-O-methyladenosine-3'-phosphate
  modified_base 19: mod_base = OTHER; note = 2'-O-methyluridine-3'-phosphate
  modified_base 20: mod_base = OTHER; note = 2'-O-methylcytidine-3'-phosphate
  modified_base 21: mod_base = OTHER; note = 2'-O-methyluridine-3'-phosphate ((2S,4R)-1-[29-[[2-(acetylamino)-2-deoxy-beta-D-galactopyra nosyl]oxy]-14,14-bis[[3-[[3-[[5-[[2-(acetylamino)-2-deoxy-b eta-D-galactopyranosyl]oxy]-1-oxopentyl]amino]propyl]amino] -3-oxopropoxy]methyl]-1,12,19,25-tetraoxo-16-oxa-13,20,24-t riazanonacos-1-yl]-4-hydroxy-2-pyrrolidinyl)methyl ester
cctcctcattttgataaatct

SEQ ID NO: 937 - RNA, 21 nt, synthetic construct
  source 1..21: mol_type = other RNA
  modified_base 1: mod_base = OTHER; note = 2'-O-methylcytidine-3'-phosphorothioate
  modified_base 2: mod_base = OTHER; note = 2'-O-methyladenosine-3'-phosphorothioate
  modified_base 3: mod_base = OTHER; note = 2'-O-methyluridine-3'-phosphate
  modified_base 4: mod_base = OTHER; note = 2'-O-methyluridine-3'-phosphate
  modified_base 5: mod_base = OTHER; note = 2'-O-methyluridine-3'-phosphate
  modified_base 6: mod_base = OTHER; note = 2'-O-methyluridine-3'-phosphate
  modified_base 7: mod_base = OTHER; note = 2'-deoxy-2'-fluoroguanosine-3'-phosphate
  modified_base 8: mod_base = OTHER; note = 2'-O-methyladenosine-3'-phosphate
  modified_base 9: mod_base = OTHER; note = 2'-deoxy-2'-fluorouridine-3'-phosphate
  modified_base 10: mod_base = OTHER; note = 2'-deoxy-2'-fluoroadenosine-3'-phosphate
  modified_base 11: mod_base = OTHER; note = 2'-deoxy-2'-fluoroadenosine-3'-phosphate
  modified_base 12: mod_base = OTHER; note = 2'-O-methyladenosine-3'-phosphate
  modified_base 13: mod_base = OTHER; note = 2'-O-methyluridine-3'-phosphate
  modified_base 14: mod_base = OTHER; note = 2'-O-methylcytidine-3'-phosphate
  modified_base 15: mod_base = OTHER; note = 2'-O-methylcytidine-3'-phosphate
  modified_base 16: mod_base = OTHER; note = 2'-O-methyladenosine-3'-phosphate
  modified_base 17: mod_base = OTHER; note = 2'-O-methyladenosine-3'-phosphate
  modified_base 18: mod_base = OTHER; note = 2'-O-methylguanosine-3'-phosphate
  modified_base 19: mod_base = OTHER; note = 2'-O-methyladenosine-3'-phosphate
  modified_base 20: mod_base = OTHER; note = 2'-O-methyladenosine-3'-phosphate
  modified_base 21: mod_base = OTHER; note = 2'-O-methyluridine-3'-phosphate ((2S,4R)-1-[29-[[2-(acetylamino)-2-deoxy-beta-D-galactopyra nosyl]oxy]-14,14-bis[[3-[[3-[[5-[[2-(acetylamino)-2-deoxy-b eta-D-galactopyranosyl]oxy]-1-oxopentyl]amino]propyl]amino] -3-oxopropoxy]methyl]-1,12,19,25-tetraoxo-16-oxa-13,20,24-t riazanonacos-1-yl]-4-hydroxy-2-pyrrolidinyl)methyl ester
cattttgataaatccaagaat

SEQ ID NO: 938 - RNA, 21 nt, synthetic construct
  source 1..21: mol_type = other RNA
  modified_base 1: mod_base = OTHER; note = 2'-O-methyladenosine-3'-phosphorothioate
  modified_base 2: mod_base = OTHER; note = 2'-O-methyladenosine-3'-phosphorothioate
  modified_base 3: mod_base = OTHER; note = 2'-O-methyladenosine-3'-phosphate
  modified_base 4: mod_base = OTHER; note = 2'-O-methyluridine-3'-phosphate
  modified_base 5: mod_base = OTHER; note = 2'-O-methylcytidine-3'-phosphate
  modified_base 6: mod_base = OTHER; note = 2'-O-methylcytidine-3'-phosphate
  modified_base 7: mod_base = OTHER; note = 2'-deoxy-2'-fluoroadenosine-3'-phosphate
  modified_base 8: mod_base = OTHER; note = 2'-O-methyladenosine-3'-phosphate
  modified_base 9: mod_base = OTHER; note = 2'-deoxy-2'-fluoroguanosine-3'-phosphate
  modified_base 10: mod_base = OTHER; note = 2'-deoxy-2'-fluoroadenosine-3'-phosphate
  modified_base 11: mod_base = OTHER; note = 2'-deoxy-2'-fluoroadenosine-3'-phosphate
  modified_base 12: mod_base = OTHER; note = 2'-O-methyladenosine-3'-phosphate
  modified_base 13: mod_base = OTHER; note = 2'-O-methyluridine-3'-phosphate
  modified_base 14: mod_base = OTHER; note = 2'-O-methyladenosine-3'-phosphate
  modified_base 15: mod_base = OTHER; note = 2'-O-methyluridine-3'-phosphate
  modified_base 16: mod_base = OTHER; note = 2'-O-methylcytidine-3'-phosphate
  modified_base 17: mod_base = OTHER; note = 2'-O-methylcytidine-3'-phosphate
  modified_base 18: mod_base = OTHER; note = 2'-O-methyluridine-3'-phosphate
  modified_base 19: mod_base = OTHER; note = 2'-O-methylcytidine-3'-phosphate
  modified_base 20: mod_base = OTHER; note = 2'-O-methyluridine-3'-phosphate
  modified_base 21: mod_base = OTHER; note = 2'-O-methyluridine-3'-phosphate ((2S,4R)-1-[29-[[2-(acetylamino)-2-deoxy-beta-D-galactopyra nosyl]oxy]-14,14-bis[[3-[[3-[[5-[[2-(acetylamino)-2-deoxy-b eta-D-galactopyranosyl]oxy]-1-oxopentyl]amino]propyl]amino] -3-oxopropoxy]methyl]-1,12,19,25-tetraoxo-16-oxa-13,20,24-t riazanonacos-1-yl]-4-hydroxy-2-pyrrolidinyl)methyl ester
aaatccaagaaatatcctctt

SEQ ID NO: 939 - RNA, 21 nt, synthetic construct
  source 1..21: mol_type = other RNA
  modified_base 1: mod_base = OTHER; note = 2'-O-methyladenosine-3'-phosphorothioate
  modified_base 2: mod_base = OTHER; note = 2'-O-methyladenosine-3'-phosphorothioate
  modified_base 3: mod_base = OTHER; note = 2'-O-methylguanosine-3'-phosphate
  modified_base 4: mod_base = OTHER; note = 2'-O-methyladenosine-3'-phosphate
  modified_base 5: mod_base = OTHER; note = 2'-O-methyladenosine-3'-phosphate
  modified_base 6: mod_base = OTHER; note = 2'-O-methyladenosine-3'-phosphate
  modified_base 7: mod_base = OTHER; note = 2'-deoxy-2'-fluorouridine-3'-phosphate
  modified_base 8: mod_base = OTHER; note = 2'-O-methyladenosine-3'-phosphate
  modified_base 9: mod_base = OTHER; note = 2'-deoxy-2'-fluorouridine-3'-phosphate
  modified_base 10: mod_base = OTHER; note = 2'-deoxy-2'-fluorocytidine-3'-phosphate
  modified_base 11: mod_base = OTHER; note = 2'-deoxy-2'-fluorocytidine-3'-phosphate
  modified_base 12: mod_base = OTHER; note = 2'-O-methyluridine-3'-phosphate
  modified_base 13: mod_base = OTHER; note = 2'-O-methylcytidine-3'-phosphate
  modified_base 14: mod_base = OTHER; note = 2'-O-methyluridine-3'-phosphate
  modified_base 15: mod_base = OTHER; note = 2'-O-methyladenosine-3'-phosphate
  modified_base 16: mod_base = OTHER; note = 2'-O-methylcytidine-3'-phosphate
  modified_base 17: mod_base = OTHER; note = 2'-O-methyluridine-3'-phosphate
  modified_base 18: mod_base = OTHER; note = 2'-O-methyladenosine-3'-phosphate
  modified_base 19: mod_base = OTHER; note = 2'-O-methyluridine-3'-phosphate
  modified_base 20: mod_base = OTHER; note = 2'-O-methyluridine-3'-phosphate
  modified_base 21: mod_base = OTHER; note = 2'-O-methyluridine-3'-phosphate ((2S,4R)-1-[29-[[2-(acetylamino)-2-deoxy-beta-D-galactopyra nosyl]oxy]-14,14-bis[[3-[[3-[[5-[[2-(acetylamino)-2-deoxy-b eta-D-galactopyranosyl]oxy]-1-oxopentyl]amino]propyl]amino] -3-oxopropoxy]methyl]-1,12,19,25-tetraoxo-16-oxa-13,20,24-t riazanonacos-1-yl]-4-hydroxy-2-pyrrolidinyl)methyl ester
aagaaatatcctctactattt

SEQ ID NO: 940 - RNA, 21 nt, synthetic construct
  source 1..21: mol_type = other RNA
  modified_base 1: mod_base = OTHER; note = 2'-O-methylcytidine-3'-phosphorothioate
  modified_base 2: mod_base = OTHER; note = 2'-O-methyluridine-3'-phosphorothioate
  modified_base 3: mod_base = OTHER; note = 2'-O-methylcytidine-3'-phosphate
  modified_base 4: mod_base = OTHER; note = 2'-O-methyluridine-3'-phosphate
  modified_base 5: mod_base = OTHER; note = 2'-O-methyladenosine-3'-phosphate
  modified_base 6: mod_base = OTHER; note = 2'-O-methylcytidine-3'-phosphate
  modified_base 7: mod_base = OTHER; note = 2'-deoxy-2'-fluorouridine-3'-phosphate
  modified_base 8: mod_base = OTHER; note = 2'-O-methyladenosine-3'-phosphate
  modified_base 9: mod_base = OTHER; note = 2'-deoxy-2'-fluorouridine-3'-phosphate
  modified_base 10: mod_base = OTHER; note = 2'-deoxy-2'-fluorouridine-3'-phosphate
  modified_base 11: mod_base = OTHER; note = 2'-deoxy-2'-fluoroadenosine-3'-phosphate
  modified_base 12: mod_base = OTHER; note = 2'-O-methylguanosine-3'-phosphate
  modified_base 13: mod_base = OTHER; note = 2'-O-methyladenosine-3'-phosphate
  modified_base 14: mod_base = OTHER; note = 2'-O-methyluridine-3'-phosphate
  modified_base 15: mod_base = OTHER; note = 2'-O-methylguanosine-3'-phosphate
  modified_base 16: mod_base = OTHER; note = 2'-O-methyluridine-3'-phosphate
  modified_base 17: mod_base = OTHER; note = 2'-O-methylguanosine-3'-phosphate
  modified_base 18: mod_base = OTHER; note = 2'-O-methyluridine-3'-phosphate
  modified_base 19: mod_base = OTHER; note = 2'-O-methyladenosine-3'-phosphate
  modified_base 20: mod_base = OTHER; note = 2'-O-methyluridine-3'-phosphate
  modified_base 21: mod_base = OTHER; note = 2'-O-methyluridine-3'-phosphate ((2S,4R)-1-[29-[[2-(acetylamino)-2-deoxy-beta-D-galactopyra nosyl]oxy]-14,14-bis[[3-[[3-[[5-[[2-(acetylamino)-2-deoxy-b eta-D-galactopyranosyl]oxy]-1-oxopentyl]amino]propyl]amino] -3-oxopropoxy]methyl]-1,12,19,25-tetraoxo-16-oxa-13,20,24-t riazanonacos-1-yl]-4-hydroxy-2-pyrrolidinyl)methyl ester
ctctactattagatgtgtatt

SEQ ID NO: 941 - RNA, 21 nt, synthetic construct
  source 1..21: mol_type = other RNA
  modified_base 1: mod_base = OTHER; note = 2'-O-methyladenosine-3'-phosphorothioate
  modified_base 2: mod_base = OTHER; note = 2'-O-methylguanosine-3'-phosphorothioate
  modified_base 3: mod_base = OTHER; note = 2'-O-methyladenosine-3'-phosphate
  modified_base 4: mod_base = OTHER; note = 2'-O-methylcytidine-3'-phosphate
  modified_base 5: mod_base = OTHER; note = 2'-O-methyladenosine-3'-phosphate
  modified_base 6: mod_base = OTHER; note = 2'-O-methylcytidine-3'-phosphate
  modified_base 7: mod_base = OTHER; note = 2'-deoxy-2'-fluorouridine-3'-phosphate
  modified_base 8: mod_base = OTHER; note = 2'-O-methylguanosine-3'-phosphate
  modified_base 9: mod_base = OTHER; note = 2'-deoxy-2'-fluorouridine-3'-phosphate
  modified_base 10: mod_base = OTHER; note = 2'-deoxy-2'-fluorocytidine-3'-phosphate
  modified_base 11: mod_base = OTHER; note = 2'-deoxy-2'-fluorouridine-3'-phosphate
  modified_base 12: mod_base = OTHER; note = 2'-O-methyluridine-3'-phosphate
  modified_base 13: mod_base = OTHER; note = 2'-O-methylcytidine-3'-phosphate
  modified_base 14: mod_base = OTHER; note = 2'-O-methyladenosine-3'-phosphate
  modified_base 15: mod_base = OTHER; note = 2'-O-methylguanosine-3'-phosphate
  modified_base 16: mod_base = OTHER; note = 2'-O-methyladenosine-3'-phosphate
  modified_base 17: mod_base = OTHER; note = 2'-O-methylcytidine-3'-phosphate
  modified_base 18: mod_base = OTHER; note = 2'-O-methyluridine-3'-phosphate
  modified_base 19: mod_base = OTHER; note = 2'-O-methylguanosine-3'-phosphate
  modified_base 20: mod_base = OTHER; note = 2'-O-methyladenosine-3'-phosphate
  modified_base 21: mod_base = OTHER; note = 2'-O-methyluridine-3'-phosphate ((2S,4R)-1-[29-[[2-(acetylamino)-2-deoxy-beta-D-galactopyra nosyl]oxy]-14,14-bis[[3-[[3-[[5-[[2-(acetylamino)-2-deoxy-b eta-D-galactopyranosyl]oxy]-1-oxopentyl]amino]propyl]amino] -3-oxopropoxy]methyl]-1,12,19,25-tetraoxo-16-oxa-13,20,24-t riazanonacos-1-yl]-4-hydroxy-2-pyrrolidinyl)methyl ester
agacactgtcttcagactgat

SEQ ID NO: 942 - RNA, 21 nt, synthetic construct
  source 1..21: mol_type = other RNA
  modified_base 1: mod_base = OTHER; note = 2'-O-methyluridine-3'-phosphorothioate
  modified_base 2: mod_base = OTHER; note = 2'-O-methylguanosine-3'-phosphorothioate
  modified_base 3: mod_base = OTHER; note = 2'-O-methyluridine-3'-phosphate
  modified_base 4: mod_base = OTHER; note = 2'-O-methylcytidine-3'-phosphate
  modified_base 5: mod_base = OTHER; note = 2'-O-methyluridine-3'-phosphate
  modified_base 6: mod_base = OTHER; note = 2'-O-methyluridine-3'-phosphate
  modified_base 7: mod_base = OTHER; note = 2'-deoxy-2'-fluorocytidine-3'-phosphate
  modified_base 8: mod_base = OTHER; note = 2'-O-methyladenosine-3'-phosphate
  modified_base 9: mod_base = OTHER; note = 2'-deoxy-2'-fluoroguanosine-3'-phosphate
  modified_base 10: mod_base = OTHER; note = 2'-deoxy-2'-fluoroadenosine-3'-phosphate
  modified_base 11: mod_base = OTHER; note = 2'-deoxy-2'-fluorocytidine-3'-phosphate
  modified_base 12: mod_base = OTHER; note = 2'-O-methyluridine-3'-phosphate
  modified_base 13: mod_base = OTHER; note = 2'-O-methylguanosine-3'-phosphate
  modified_base 14: mod_base = OTHER; note = 2'-O-methyladenosine-3'-phosphate
  modified_base 15: mod_base = OTHER; note = 2'-O-methyladenosine-3'-phosphate
  modified_base 16: mod_base = OTHER; note = 2'-O-methylcytidine-3'-phosphate
  modified_base 17: mod_base = OTHER; note = 2'-O-methyluridine-3'-phosphate
  modified_base 18: mod_base = OTHER; note = 2'-O-methylguanosine-3'-phosphate
  modified_base 19: mod_base = OTHER; note = 2'-O-methylguanosine-3'-phosphate
  modified_base 20: mod_base = OTHER; note = 2'-O-methylguanosine-3'-phosphate
  modified_base 21: mod_base = OTHER; note = 2'-O-methyluridine-3'-phosphate ((2S,4R)-1-[29-[[2-(acetylamino)-2-deoxy-beta-D-galactopyra nosyl]oxy]-14,14-bis[[3-[[3-[[5-[[2-(acetylamino)-2-deoxy-b eta-D-galactopyranosyl]oxy]-1-oxopentyl]amino]propyl]amino] -3-oxopropoxy]methyl]-1,12,19,25-tetraoxo-16-oxa-13,20,24-t riazanonacos-1-yl]-4-hydroxy-2-pyrrolidinyl)methyl ester
tgtcttcagactgaactgggt

SEQ ID NO: 943 - RNA, 21 nt, synthetic construct
  source 1..21: mol_type = other RNA
  modified_base 1: mod_base = OTHER; note = 2'-O-methyladenosine-3'-phosphorothioate
  modified_base 2: mod_base = OTHER; note = 2'-O-methylguanosine-3'-phosphorothioate
  modified_base 3: mod_base = OTHER; note = 2'-O-methyladenosine-3'-phosphate
  modified_base 4: mod_base = OTHER; note = 2'-O-methylcytidine-3'-phosphate
  modified_base 5: mod_base = OTHER; note = 2'-O-methyluridine-3'-phosphate
  modified_base 6: mod_base = OTHER; note = 2'-O-methylguanosine-3'-phosphate
  modified_base 7: mod_base = OTHER; note = 2'-deoxy-2'-fluoroadenosine-3'-phosphate
  modified_base 8: mod_base = OTHER; note = 2'-O-methyladenosine-3'-phosphate
  modified_base 9: mod_base = OTHER; note = 2'-deoxy-2'-fluorocytidine-3'-phosphate
  modified_base 10: mod_base = OTHER; note = 2'-deoxy-2'-fluorouridine-3'-phosphate
  modified_base 11: mod_base = OTHER; note = 2'-deoxy-2'-fluoroguanosine-3'-phosphate
  modified_base 12: mod_base = OTHER; note = 2'-O-methylguanosine-3'-phosphate
  modified_base 13: mod_base = OTHER; note = 2'-O-methylguanosine-3'-phosphate
  modified_base 14: mod_base = OTHER; note = 2'-O-methylcytidine-3'-phosphate
  modified_base 15: mod_base = OTHER; note = 2'-O-methylcytidine-3'-phosphate
  modified_base 16: mod_base = OTHER; note = 2'-O-methyladenosine-3'-phosphate
  modified_base 17: mod_base = OTHER; note = 2'-O-methylcytidine-3'-phosphate
  modified_base 18: mod_base = OTHER; note = 2'-O-methyluridine-3'-phosphate
  modified_base 19: mod_base = OTHER; note = 2'-O-methyluridine-3'-phosphate
  modified_base 20: mod_base = OTHER; note = 2'-O-methyladenosine-3'-phosphate
  modified_base 21: mod_base = OTHER; note = 2'-O-methyluridine-3'-phosphate ((2S,4R)-1-[29-[[2-(acetylamino)-2-deoxy-beta-D-galactopyra nosyl]oxy]-14,14-bis[[3-[[3-[[5-[[2-(acetylamino)-2-deoxy-b eta-D-galactopyranosyl]oxy]-1-oxopentyl]amino]propyl]amino] -3-oxopropoxy]methyl]-1,12,19,25-tetraoxo-16-oxa-13,20,24-t riazanonacos-1-yl]-4-hydroxy-2-pyrrolidinyl)methyl ester
agactgaactgggccacttat

SEQ ID NO: 944 - RNA, 21 nt, synthetic construct
  source 1..21: mol_type = other RNA
  modified_base 1: mod_base = OTHER; note = 2'-O-methylcytidine-3'-phosphorothioate
  modified_base 2: mod_base = OTHER; note = 2'-O-methylcytidine-3'-phosphorothioate
  modified_base 3: mod_base = OTHER; note = 2'-O-methyladenosine-3'-phosphate
  modified_base 4: mod_base = OTHER; note = 2'-O-methylcytidine-3'-phosphate
  modified_base 5: mod_base = OTHER; note = 2'-O-methyluridine-3'-phosphate
  modified_base 6: mod_base = OTHER; note = 2'-O-methyluridine-3'-phosphate
  modified_base 7: mod_base = OTHER; note = 2'-deoxy-2'-fluoroadenosine-3'-phosphate
  modified_base 8: mod_base = OTHER; note = 2'-O-methylcytidine-3'-phosphate
  modified_base 9: mod_base = OTHER; note = 2'-deoxy-2'-fluorocytidine-3'-phosphate
  modified_base 10: mod_base = OTHER; note = 2'-deoxy-2'-fluorouridine-3'-phosphate
  modified_base 11: mod_base = OTHER; note = 2'-deoxy-2'-fluorouridine-3'-phosphate
  modified_base 12: mod_base = OTHER; note = 2'-O-methylguanosine-3'-phosphate
  modified_base 13: mod_base = OTHER; note = 2'-O-methylcytidine-3'-phosphate
  modified_base 14: mod_base = OTHER; note = 2'-O-methyladenosine-3'-phosphate
  modified_base 15: mod_base = OTHER; note = 2'-O-methyladenosine-3'-phosphate
  modified_base 16: mod_base = OTHER; note = 2'-O-methylguanosine-3'-phosphate
  modified_base 17: mod_base = OTHER; note = 2'-O-methylcytidine-3'-phosphate
  modified_base 18: mod_base = OTHER; note = 2'-O-methyladenosine-3'-phosphate
  modified_base 19: mod_base = OTHER; note = 2'-O-methylcytidine-3'-phosphate
  modified_base 20: mod_base = OTHER; note = 2'-O-methyladenosine-3'-phosphate
  modified_base 21: mod_base = OTHER; note = 2'-O-methyluridine-3'-phosphate ((2S,4R)-1-[29-[[2-(acetylamino)-2-deoxy-beta-D-galactopyra nosyl]oxy]-14,14-bis[[3-[[3-[[5-[[2-(acetylamino)-2-deoxy-b eta-D-galactopyranosyl]oxy]-1-oxopentyl]amino]propyl]amino] -3-oxopropoxy]methyl]-1,12,19,25-tetraoxo-16-oxa-13,20,24-t riazanonacos-1-yl]-4-hydroxy-2-pyrrolidinyl)methyl ester
ccacttaccttgcaagcacat

SEQ ID NO: 945 - RNA, 21 nt, synthetic construct
  source 1..21: mol_type = other RNA
  modified_base 1: mod_base = OTHER; note = 2'-O-methyluridine-3'-phosphorothioate
  modified_base 2: mod_base = OTHER; note = 2'-O-methyluridine-3'-phosphorothioate
  modified_base 3: mod_base = OTHER; note = 2'-O-methylguanosine-3'-phosphate
  modified_base 4: mod_base = OTHER; note = 2'-O-methylcytidine-3'-phosphate
  modified_base 5: mod_base = OTHER; note = 2'-O-methyladenosine-3'-phosphate
  modified_base 6: mod_base = OTHER; note = 2'-O-methyladenosine-3'-phosphate
  modified_base 7: mod_base = OTHER; note = 2'-deoxy-2'-fluoroguanosine-3'-phosphate
  modified_base 8: mod_base = OTHER; note = 2'-O-methylcytidine-3'-phosphate
  modified_base 9: mod_base = OTHER; note = 2'-deoxy-2'-fluoroadenosine-3'-phosphate
  modified_base 10: mod_base = OTHER; note = 2'-deoxy-2'-fluorocytidine-3'-phosphate
  modified_base 11: mod_base = OTHER; note = 2'-deoxy-2'-fluoroadenosine-3'-phosphate
  modified_base 12: mod_base = OTHER; note = 2'-O-methylguanosine-3'-phosphate
  modified_base 13: mod_base = OTHER; note = 2'-O-methyladenosine-3'-phosphate
  modified_base 14: mod_base = OTHER; note = 2'-O-methyladenosine-3'-phosphate
  modified_base 15: mod_base = OTHER; note = 2'-O-methyladenosine-3'-phosphate
  modified_base 16: mod_base = OTHER; note = 2'-O-methyladenosine-3'-phosphate
  modified_base 17: mod_base = OTHER; note = 2'-O-methylcytidine-3'-phosphate
  modified_base 18: mod_base = OTHER; note = 2'-O-methyladenosine-3'-phosphate
  modified_base 19: mod_base = OTHER; note = 2'-O-methyluridine-3'-phosphate
  modified_base 20: mod_base = OTHER; note = 2'-O-methyluridine-3'-phosphate
  modified_base 21: mod_base = OTHER; note = 2'-O-methyluridine-3'-phosphate ((2S,4R)-1-[29-[[2-(acetylamino)-2-deoxy-beta-D-galactopyra nosyl]oxy]-14,14-bis[[3-[[3-[[5-[[2-(acetylamino)-2-deoxy-b eta-D-galactopyranosyl]oxy]-1-oxopentyl]amino]propyl]amino] -3-oxopropoxy]methyl]-1,12,19,25-tetraoxo-16-oxa-13,20,24-t riazanonacos-1-yl]-4-hydroxy-2-pyrrolidinyl)methyl ester
ttgcaagcacagaaaacattt

SEQ ID NO: 946 - RNA, 21 nt, synthetic construct
  source 1..21: mol_type = other RNA
  modified_base 1: mod_base = OTHER; note = 2'-O-methylcytidine-3'-phosphorothioate
  modified_base 2: mod_base = OTHER; note = 2'-O-methyladenosine-3'-phosphorothioate
  modified_base 3: mod_base = OTHER; note = 2'-O-methylcytidine-3'-phosphate
  modified_base 4: mod_base = OTHER; note = 2'-O-methyladenosine-3'-phosphate
  modified_base 5: mod_base = OTHER; note = 2'-O-methylguanosine-3'-phosphate
  modified_base 6: mod_base = OTHER; note = 2'-O-methyladenosine-3'-phosphate
  modified_base 7: mod_base = OTHER; note = 2'-deoxy-2'-fluoroadenosine-3'-phosphate
  modified_base 8: mod_base = OTHER; note = 2'-O-methyladenosine-3'-phosphate
  modified_base 9: mod_base = OTHER; note = 2'-deoxy-2'-fluoroadenosine-3'-phosphate
  modified_base 10: mod_base = OTHER; note = 2'-deoxy-2'-fluorocytidine-3'-phosphate
  modified_base 11: mod_base = OTHER; note = 2'-deoxy-2'-fluoroadenosine-3'-phosphate
  modified_base 12: mod_base = OTHER; note = 2'-O-methyluridine-3'-phosphate
  modified_base 13: mod_base = OTHER; note = 2'-O-methyluridine-3'-phosphate
  modified_base 14: mod_base = OTHER; note = 2'-O-methyladenosine-3'-phosphate
  modified_base 15: mod_base = OTHER; note = 2'-O-methyluridine-3'-phosphate
  modified_base 16: mod_base = OTHER; note = 2'-O-methyladenosine-3'-phosphate
  modified_base 17: mod_base = OTHER; note = 2'-O-methylguanosine-3'-phosphate
  modified_base 18: mod_base = OTHER; note = 2'-O-methyluridine-3'-phosphate
  modified_base 19: mod_base = OTHER; note = 2'-O-methyladenosine-3'-phosphate
  modified_base 20: mod_base = OTHER; note = 2'-O-methylguanosine-3'-phosphate
  modified_base 21: mod_base = OTHER; note = 2'-O-methyluridine-3'-phosphate ((2S,4R)-1-[29-[[2-(acetylamino)-2-deoxy-beta-D-galactopyra nosyl]oxy]-14,14-bis[[3-[[3-[[5-[[2-(acetylamino)-2-deoxy-b eta-D-galactopyranosyl]oxy]-1-oxopentyl]amino]propyl]amino] -3-oxopropoxy]methyl]-1,12,19,25-tetraoxo-16-oxa-13,20,24-t riazanonacos-1-yl]-4-hydroxy-2-pyrrolidinyl)methyl ester
cacagaaaacattatagtagt

SEQ ID NO: 947 - RNA, 21 nt, synthetic construct
  source 1..21: mol_type = other RNA
  modified_base 1: mod_base = OTHER; note = 2'-O-methyladenosine-3'-phosphorothioate
  modified_base 2: mod_base = OTHER; note = 2'-O-methylcytidine-3'-phosphorothioate
  modified_base 3: mod_base = OTHER; note = 2'-O-methyladenosine-3'-phosphate
  modified_base 4: mod_base = OTHER; note = 2'-O-methyluridine-3'-phosphate
  modified_base 5: mod_base = OTHER; note = 2'-O-methyluridine-3'-phosphate
  modified_base 6: mod_base = OTHER; note = 2'-O-methyladenosine-3'-phosphate
  modified_base 7: mod_base = OTHER; note = 2'-deoxy-2'-fluorouridine-3'-phosphate
  modified_base 8: mod_base = OTHER; note = 2'-O-methyladenosine-3'-phosphate
  modified_base 9: mod_base = OTHER; note = 2'-deoxy-2'-fluoroguanosine-3'-phosphate
  modified_base 10: mod_base = OTHER; note = 2'-deoxy-2'-fluorouridine-3'-phosphate
  modified_base 11: mod_base = OTHER; note = 2'-deoxy-2'-fluoroadenosine-3'-phosphate
  modified_base 12: mod_base = OTHER; note = 2'-O-methylguanosine-3'-phosphate
  modified_base 13: mod_base = OTHER; note = 2'-O-methylcytidine-3'-phosphate
  modified_base 14: mod_base = OTHER; note = 2'-O-methyluridine-3'-phosphate
  modified_base 15: mod_base = OTHER; note = 2'-O-methyladenosine-3'-phosphate
  modified_base 16: mod_base = OTHER; note = 2'-O-methylguanosine-3'-phosphate
  modified_base 17: mod_base = OTHER; note = 2'-O-methylcytidine-3'-phosphate
  modified_base 18: mod_base = OTHER; note = 2'-O-methyluridine-3'-phosphate
  modified_base 19: mod_base = OTHER; note = 2'-O-methyluridine-3'-phosphate
  modified_base 20: mod_base = OTHER; note = 2'-O-methyluridine-3'-phosphate
  modified_base 21: mod_base = OTHER; note = 2'-O-methyluridine-3'-phosphate ((2S,4R)-1-[29-[[2-(acetylamino)-2-deoxy-beta-D-galactopyra nosyl]oxy]-14,14-bis[[3-[[3-[[5-[[2-(acetylamino)-2-deoxy-b eta-D-galactopyranosyl]oxy]-1-oxopentyl]amino]propyl]amino] -3-oxopropoxy]methyl]-1,12,19,25-tetraoxo-16-oxa-13,20,24-t riazanonacos-1-yl]-4-hydroxy-2-pyrrolidinyl)methyl ester
acattatagtagctagctttt

SEQ ID NO: 948 - RNA, 21 nt, synthetic construct
  source 1..21: mol_type = other RNA
  modified_base 1: mod_base = OTHER; note = 2'-O-methylguanosine-3'-phosphorothioate
  modified_base 2: mod_base = OTHER; note = 2'-O-methyluridine-3'-phosphorothioate
  modified_base 3: mod_base = OTHER; note = 2'-O-methyladenosine-3'-phosphate
  modified_base 4: mod_base = OTHER; note = 2'-O-methylguanosine-3'-phosphate
  modified_base 5: mod_base = OTHER; note = 2'-O-methylcytidine-3'-phosphate
  modified_base 6: mod_base = OTHER; note = 2'-O-methyluridine-3'-phosphate
  modified_base 7: mod_base = OTHER; note = 2'-deoxy-2'-fluoroadenosine-3'-phosphate
  modified_base 8: mod_base = OTHER; note = 2'-O-methylguanosine-3'-phosphate
  modified_base 9: mod_base = OTHER; note = 2'-deoxy-2'-fluorocytidine-3'-phosphate
  modified_base 10: mod_base = OTHER; note = 2'-deoxy-2'-fluorouridine-3'-phosphate
  modified_base 11: mod_base = OTHER; note = 2'-deoxy-2'-fluorouridine-3'-phosphate
  modified_base 12: mod_base = OTHER; note = 2'-O-methyluridine-3'-phosphate
  modified_base 13: mod_base = OTHER; note = 2'-O-methylguanosine-3'-phosphate
  modified_base 14: mod_base = OTHER; note = 2'-O-methyladenosine-3'-phosphate
  modified_base 15: mod_base = OTHER; note = 2'-O-methyluridine-3'-phosphate
  modified_base 16: mod_base = OTHER; note = 2'-O-methylguanosine-3'-phosphate
  modified_base 17: mod_base = OTHER; note = 2'-O-methylguanosine-3'-phosphate
  modified_base 18: mod_base = OTHER; note = 2'-O-methylcytidine-3'-phosphate
  modified_base 19: mod_base = OTHER; note = 2'-O-methyladenosine-3'-phosphate
  modified_base 20: mod_base = OTHER; note = 2'-O-methylguanosine-3'-phosphate
  modified_base 21: mod_base = OTHER; note = 2'-O-methyluridine-3'-phosphate ((2S,4R)-1-[29-[[2-(acetylamino)-2-deoxy-beta-D-galactopyra nosyl]oxy]-14,14-bis[[3-[[3-[[5-[[2-(acetylamino)-2-deoxy-b eta-D-galactopyranosyl]oxy]-1-oxopentyl]amino]propyl]amino] -3-oxopropoxy]methyl]-1,12,19,25-tetraoxo-16-oxa-13,20,24-t riazanonacos-1-yl]-4-hydroxy-2-pyrrolidinyl)methyl ester
gtagctagctttgatggcagt

SEQ ID NO: 949 - RNA, 21 nt, synthetic construct
  source 1..21: mol_type = other RNA
  modified_base 1: mod_base = OTHER; note = 2'-O-methylguanosine-3'-phosphorothioate
  modified_base 2: mod_base = OTHER; note = 2'-O-methylcytidine-3'-phosphorothioate
  modified_base 3: mod_base = OTHER; note = 2'-O-methyluridine-3'-phosphate
  modified_base 4: mod_base = OTHER; note = 2'-O-methyluridine-3'-phosphate
  modified_base 5: mod_base = OTHER; note = 2'-O-methyluridine-3'-phosphate
  modified_base 6: mod_base = OTHER; note = 2'-O-methylguanosine-3'-phosphate
  modified_base 7: mod_base = OTHER; note = 2'-deoxy-2'-fluoroadenosine-3'-phosphate
  modified_base 8: mod_base = OTHER; note = 2'-O-methyluridine-3'-phosphate
  modified_base 9: mod_base = OTHER; note = 2'-deoxy-2'-fluoroguanosine-3'-phosphate
  modified_base 10: mod_base = OTHER; note = 2'-deoxy-2'-fluoroguanosine-3'-phosphate
  modified_base 11: mod_base = OTHER; note = 2'-deoxy-2'-fluorocytidine-3'-phosphate
  modified_base 12: mod_base = OTHER; note = 2'-O-methyladenosine-3'-phosphate
  modified_base 13: mod_base = OTHER; note = 2'-O-methylguanosine-3'-phosphate
  modified_base 14: mod_base = OTHER; note = 2'-O-methyladenosine-3'-phosphate
  modified_base 15: mod_base = OTHER; note = 2'-O-methylguanosine-3'-phosphate
  modified_base 16: mod_base = OTHER; note = 2'-O-methylguanosine-3'-phosphate
  modified_base 17: mod_base = OTHER; note = 2'-O-methyladenosine-3'-phosphate
  modified_base 18: mod_base = OTHER; note = 2'-O-methyladenosine-3'-phosphate
  modified_base 19: mod_base = OTHER; note = 2'-O-methylguanosine-3'-phosphate
  modified_base 20: mod_base = OTHER; note = 2'-O-methyluridine-3'-phosphate
  modified_base 21: mod_base = OTHER; note = 2'-O-methyluridine-3'-phosphate ((2S,4R)-1-[29-[[2-(acetylamino)-2-deoxy-beta-D-galactopyra nosyl]oxy]-14,14-bis[[3-[[3-[[5-[[2-(acetylamino)-2-deoxy-b eta-D-galactopyranosyl]oxy]-1-oxopentyl]amino]propyl]amino] -3-oxopropoxy]methyl]-1,12,19,25-tetraoxo-16-oxa-13,20,24-t riazanonacos-1-yl]-4-hydroxy-2-pyrrolidinyl)methyl ester
gctttgatggcagaggaagtt

SEQ ID NO: 950 - RNA, 21 nt, synthetic construct
  source 1..21: mol_type = other RNA
  modified_base 1: mod_base = OTHER; note = 2'-O-methylguanosine-3'-phosphorothioate
  modified_base 2: mod_base = OTHER; note = 2'-O-methylcytidine-3'-phosphorothioate
  modified_base 3: mod_base = OTHER; note = 2'-O-methyladenosine-3'-phosphate
  modified_base 4: mod_base = OTHER; note = 2'-O-methylguanosine-3'-phosphate
  modified_base 5: mod_base = OTHER; note = 2'-O-methyladenosine-3'-phosphate
  modified_base 6: mod_base = OTHER; note = 2'-O-methylguanosine-3'-phosphate
  modified_base 7: mod_base = OTHER; note = 2'-deoxy-2'-fluoroguanosine-3'-phosphate
  modified_base 8: mod_base = OTHER; note = 2'-O-methyladenosine-3'-phosphate
  modified_base 9: mod_base = OTHER; note = 2'-deoxy-2'-fluoroadenosine-3'-phosphate
  modified_base 10: mod_base = OTHER; note = 2'-deoxy-2'-fluoroguanosine-3'-phosphate
  modified_base 11: mod_base = OTHER; note = 2'-deoxy-2'-fluorouridine-3'-phosphate
  modified_base 12: mod_base = OTHER; note = 2'-O-methylguanosine-3'-phosphate
  modified_base 13: mod_base = OTHER; note = 2'-O-methylguanosine-3'-phosphate
  modified_base 14: mod_base = OTHER; note = 2'-O-methyluridine-3'-phosphate
  modified_base 15: mod_base = OTHER; note = 2'-O-methyluridine-3'-phosphate
  modified_base 16: mod_base = OTHER; note = 2'-O-methyladenosine-3'-phosphate
  modified_base 17: mod_base = OTHER; note = 2'-O-methylcytidine-3'-phosphate
  modified_base 18: mod_base = OTHER; note = 2'-O-methylcytidine-3'-phosphate
  modified_base 19: mod_base = OTHER; note = 2'-O-methyladenosine-3'-phosphate
  modified_base 20: mod_base = OTHER; note = 2'-O-methyladenosine-3'-phosphate
  modified_base 21: mod_base = OTHER; note = 2'-O-methyluridine-3'-phosphate ((2S,4R)-1-[29-[[2-(acetylamino)-2-deoxy-beta-D-galactopyra nosyl]oxy]-14,14-bis[[3-[[3-[[5-[[2-(acetylamino)-2-deoxy-b eta-D-galactopyranosyl]oxy]-1-oxopentyl]amino]propyl]amino] -3-oxopropoxy]methyl]-1,12,19,25-tetraoxo-16-oxa-13,20,24-t riazanonacos-1-yl]-4-hydroxy-2-pyrrolidinyl)methyl ester
gcagaggaagtggttaccaat

SEQ ID NO: 951 - RNA, 21 nt, synthetic construct
  source 1..21: mol_type = other RNA
  modified_base 1: mod_base = OTHER; note = 2'-O-methylguanosine-3'-phosphorothioate
  modified_base 2: mod_base = OTHER; note = 2'-O-methylguanosine-3'-phosphorothioate
  modified_base 3: mod_base = OTHER; note = 2'-O-methyluridine-3'-phosphate
  modified_base 4: mod_base = OTHER; note = 2'-O-methyluridine-3'-phosphate
  modified_base 5: mod_base = OTHER; note = 2'-O-methyladenosine-3'-phosphate
  modified_base 6: mod_base = OTHER; note = 2'-O-methylcytidine-3'-phosphate
  modified_base 7: mod_base = OTHER; note = 2'-deoxy-2'-fluorocytidine-3'-phosphate
  modified_base 8: mod_base = OTHER; note = 2'-O-methyladenosine-3'-phosphate
  modified_base 9: mod_base = OTHER; note = 2'-deoxy-2'-fluoroadenosine-3'-phosphate
  modified_base 10: mod_base = OTHER; note = 2'-deoxy-2'-fluoroguanosine-3'-phosphate
  modified_base 11: mod_base = OTHER; note = 2'-deoxy-2'-fluoroguanosine-3'-phosphate
  modified_base 12: mod_base = OTHER; note = 2'-O-methyladenosine-3'-phosphate
  modified_base 13: mod_base = OTHER; note = 2'-O-methylguanosine-3'-phosphate
  modified_base 14: mod_base = OTHER; note = 2'-O-methyladenosine-3'-phosphate
  modified_base 15: mod_base = OTHER; note = 2'-O-methyluridine-3'-phosphate
  modified_base 16: mod_base = OTHER; note = 2'-O-methyladenosine-3'-phosphate
  modified_base 17: mod_base = OTHER; note = 2'-O-methyladenosine-3'-phosphate
  modified_base 18: mod_base = OTHER; note = 2'-O-methylguanosine-3'-phosphate
  modified_base 19: mod_base = OTHER; note = 2'-O-methyladenosine-3'-phosphate
  modified_base 20: mod_base = OTHER; note = 2'-O-methyluridine-3'-phosphate
  modified_base 21: mod_base = OTHER; note = 2'-O-methyluridine-3'-phosphate ((2S,4R)-1-[29-[[2-(acetylamino)-2-deoxy-beta-D-galactopyra nosyl]oxy]-14,14-bis[[3-[[3-[[5-[[2-(acetylamino)-2-deoxy-b eta-D-galactopyranosyl]oxy]-1-oxopentyl]amino]propyl]amino] -3-oxopropoxy]methyl]-1,12,19,25-tetraoxo-16-oxa-13,20,24-t riazanonacos-1-yl]-4-hydroxy-2-pyrrolidinyl)methyl ester
ggttaccaaggagataagatt

SEQ ID NO: 952 - RNA, 21 nt, synthetic construct
  source 1..21: mol_type = other RNA
  modified_base 1: mod_base = OTHER; note = 2'-O-methyladenosine-3'-phosphorothioate
  modified_base 2: mod_base = OTHER; note = 2'-O-methyladenosine-3'-phosphorothioate
  modified_base 3: mod_base = OTHER; note = 2'-O-methylguanosine-3'-phosphate
  modified_base 4: mod_base = OTHER; note = 2'-O-methylguanosine-3'-phosphate
  modified_base 5: mod_base = OTHER; note = 2'-O-methyladenosine-3'-phosphate
  modified_base 6: mod_base = OTHER; note = 2'-O-methylguanosine-3'-phosphate
  modified_base 7: mod_base = OTHER; note = 2'-deoxy-2'-fluoroadenosine-3'-phosphate
  modified_base 8: mod_base = OTHER; note = 2'-O-methyluridine-3'-phosphate
  modified_base 9: mod_base = OTHER; note = 2'-deoxy-2'-fluoroadenosine-3'-phosphate
  modified_base 10: mod_base = OTHER; note = 2'-deoxy-2'-fluoroadenosine-3'-phosphate
  modified_base 11: mod_base = OTHER; note = 2'-deoxy-2'-fluoroguanosine-3'-phosphate
  modified_base 12: mod_base = OTHER; note = 2'-O-methyladenosine-3'-phosphate
  modified_base 13: mod_base = OTHER; note = 2'-O-methyluridine-3'-phosphate
  modified_base 14: mod_base = OTHER; note = 2'-O-methylcytidine-3'-phosphate
  modified_base 15: mod_base = OTHER; note = 2'-O-methyladenosine-3'-phosphate
  modified_base 16: mod_base = OTHER; note = 2'-O-methyluridine-3'-phosphate
  modified_base 17: mod_base = OTHER; note = 2'-O-methylguanosine-3'-phosphate
  modified_base 18: mod_base = OTHER; note = 2'-O-methylcytidine-3'-phosphate
  modified_base 19: mod_base = OTHER; note = 2'-O-methyladenosine-3'-phosphate
  modified_base 20: mod_base = OTHER; note = 2'-O-methyluridine-3'-phosphate
  modified_base 21: mod_base = OTHER; note = 2'-O-methyluridine-3'-phosphate ((2S,4R)-1-[29-[[2-(acetylamino)-2-deoxy-beta-D-galactopyra nosyl]oxy]-14,14-bis[[3-[[3-[[5-[[2-(acetylamino)-2-deoxy-b eta-D-galactopyranosyl]oxy]-1-oxopentyl]amino]propyl]amino] -3-oxopropoxy]methyl]-1,12,19,25-tetraoxo-16-oxa-13,20,24-t riazanonacos-1-yl]-4-hydroxy-2-pyrrolidinyl)methyl ester
aaggagataagatcatgcatt

SEQ ID NO: 953 - RNA, 21 nt, synthetic construct
  source 1..21: mol_type = other RNA
  modified_base 1: mod_base = OTHER; note = 2'-O-methyladenosine-3'-phosphorothioate
  modified_base 2: mod_base = OTHER; note = 2'-O-methyladenosine-3'-phosphorothioate
  modified_base 3: mod_base = OTHER; note = 2'-O-methylguanosine-3'-phosphate
  modified_base 4: mod_base = OTHER; note = 2'-O-methyladenosine-3'-phosphate
  modified_base 5: mod_base = OTHER; note = 2'-O-methyluridine-3'-phosphate
  modified_base 6: mod_base = OTHER; note = 2'-O-methylcytidine-3'-phosphate
  modified_base 7: mod_base = OTHER; note = 2'-deoxy-2'-fluoroadenosine-3'-phosphate
  modified_base 8: mod_base = OTHER; note = 2'-O-methyluridine-3'-phosphate
  modified_base 9: mod_base = OTHER; note = 2'-deoxy-2'-fluoroguanosine-3'-phosphate
  modified_base 10: mod_base = OTHER; note = 2'-deoxy-2'-fluorocytidine-3'-phosphate
  modified_base 11: mod_base = OTHER; note = 2'-deoxy-2'-fluoroadenosine-3'-phosphate
  modified_base 12: mod_base = OTHER; note = 2'-O-methyluridine-3'-phosphate
  modified_base 13: mod_base = OTHER; note = 2'-O-methylguanosine-3'-phosphate
  modified_base 14: mod_base = OTHER; note = 2'-O-methylcytidine-3'-phosphate
  modified_base 15: mod_base = OTHER; note = 2'-O-methyladenosine-3'-phosphate
  modified_base 16: mod_base = OTHER; note = 2'-O-methyladenosine-3'-phosphate
  modified_base 17: mod_base = OTHER; note = 2'-O-methyluridine-3'-phosphate
  modified_base 18: mod_base = OTHER; note = 2'-O-methylcytidine-3'-phosphate
  modified_base 19: mod_base = OTHER; note = 2'-O-methyladenosine-3'-phosphate
  modified_base 20: mod_base = OTHER; note = 2'-O-methyladenosine-3'-phosphate
  modified_base 21: mod_base = OTHER; note = 2'-O-methyluridine-3'-phosphate ((2S,4R)-1-[29-[[2-(acetylamino)-2-deoxy-beta-D-galactopyra nosyl]oxy]-14,14-bis[[3-[[3-[[5-[[2-(acetylamino)-2-deoxy-b eta-D-galactopyranosyl]oxy]-1-oxopentyl]amino]propyl]amino] -3-oxopropoxy]methyl]-1,12,19,25-tetraoxo-16-oxa-13,20,24-t riazanonacos-1-yl]-4-hydroxy-2-pyrrolidinyl)methyl ester
aagatcatgcatgcaatcaat

SEQ ID NO: 954 - RNA, 21 nt, synthetic construct
  source 1..21: mol_type = other RNA
  modified_base 1: mod_base = OTHER; note = 2'-O-methylcytidine-3'-phosphorothioate
  modified_base 2: mod_base = OTHER; note = 2'-O-methyladenosine-3'-phosphorothioate
  modified_base 3: mod_base = OTHER; note = 2'-O-methyluridine-3'-phosphate
  modified_base 4: mod_base = OTHER; note = 2'-O-methylguanosine-3'-phosphate
  modified_base 5: mod_base = OTHER; note = 2'-O-methylcytidine-3'-phosphate
  modified_base 6: mod_base = OTHER; note = 2'-O-methyladenosine-3'-phosphate
  modified_base 7: mod_base = OTHER; note = 2'-deoxy-2'-fluoroadenosine-3'-phosphate
  modified_base 8: mod_base = OTHER; note = 2'-O-methyluridine-3'-phosphate
  modified_base 9: mod_base = OTHER; note = 2'-deoxy-2'-fluorocytidine-3'-phosphate
  modified_base 10: mod_base = OTHER; note = 2'-deoxy-2'-fluoroadenosine-3'-phosphate
  modified_base 11: mod_base = OTHER; note = 2'-deoxy-2'-fluoroadenosine-3'-phosphate
  modified_base 12: mod_base = OTHER; note = 2'-O-methylcytidine-3'-phosphate
  modified_base 13: mod_base = OTHER; note = 2'-O-methyladenosine-3'-phosphate
  modified_base 14: mod_base = OTHER; note = 2'-O-methylguanosine-3'-phosphate
  modified_base 15: mod_base = OTHER; note = 2'-O-methyladenosine-3'-phosphate
  modified_base 16: mod_base = OTHER; note = 2'-O-methyladenosine-3'-phosphate
  modified_base 17: mod_base = OTHER; note = 2'-O-methylguanosine-3'-phosphate
  modified_base 18: mod_base = OTHER; note = 2'-O-methyladenosine-3'-phosphate
  modified_base 19: mod_base = OTHER; note = 2'-O-methylcytidine-3'-phosphate
  modified_base 20: mod_base = OTHER; note = 2'-O-methyluridine-3'-phosphate
  modified_base 21: mod_base = OTHER; note = 2'-O-methyluridine-3'-phosphate ((2S,4R)-1-[29-[[2-(acetylamino)-2-deoxy-beta-D-galactopyra nosyl]oxy]-14,14-bis[[3-[[3-[[5-[[2-(acetylamino)-2-deoxy-b eta-D-galactopyranosyl]oxy]-1-oxopentyl]amino]propyl]amino] -3-oxopropoxy]methyl]-1,12,19,25-tetraoxo-16-oxa-13,20,24-t riazanonacos-1-yl]-4-hydroxy-2-pyrrolidinyl)methyl ester
catgcaatcaacagaagactt

SEQ ID NO: 955 - RNA, 21 nt, synthetic construct
  source 1..21: mol_type = other RNA
  modified_base 1: mod_base = OTHER; note = 2'-O-methyladenosine-3'-phosphorothioate
  modified_base 2: mod_base = OTHER; note = 2'-O-methylcytidine-3'-phosphorothioate
  modified_base 3: mod_base = OTHER; note = 2'-O-methyladenosine-3'-phosphate
  modified_base 4: mod_base = OTHER; note = 2'-O-methylguanosine-3'-phosphate
  modified_base 5: mod_base = OTHER; note = 2'-O-methyladenosine-3'-phosphate
  modified_base 6: mod_base = OTHER; note = 2'-O-methyladenosine-3'-phosphate
  modified_base 7: mod_base = OTHER; note = 2'-deoxy-2'-fluoroguanosine-3'-phosphate
  modified_base 8: mod_base = OTHER; note = 2'-O-methyladenosine-3'-phosphate
  modified_base 9: mod_base = OTHER; note = 2'-deoxy-2'-fluorocytidine-3'-phosphate
  modified_base 10: mod_base = OTHER; note = 2'-deoxy-2'-fluorouridine-3'-phosphate
  modified_base 11: mod_base = OTHER; note = 2'-deoxy-2'-fluoroguanosine-3'-phosphate
  modified_base 12: mod_base = OTHER; note = 2'-O-methylguanosine-3'-phosphate
  modified_base 13: mod_base = OTHER; note = 2'-O-methylguanosine-3'-phosphate
  modified_base 14: mod_base = OTHER; note = 2'-O-methyladenosine-3'-phosphate
  modified_base 15: mod_base = OTHER; note = 2'-O-methyladenosine-3'-phosphate
  modified_base 16: mod_base = OTHER; note = 2'-O-methylcytidine-3'-phosphate
  modified_base 17: mod_base = OTHER; note = 2'-O-methyladenosine-3'-phosphate
  modified_base 18: mod_base = OTHER; note = 2'-O-methyluridine-3'-phosphate
  modified_base 19: mod_base = OTHER; note = 2'-O-methyluridine-3'-phosphate
  modified_base 20: mod_base = OTHER; note = 2'-O-methyluridine-3'-phosphate
  modified_base 21: mod_base = OTHER; note = 2'-O-methyluridine-3'-phosphate ((2S,4R)-1-[29-[[2-(acetylamino)-2-deoxy-beta-D-galactopyra nosyl]oxy]-14,14-bis[[3-[[3-[[5-[[2-(acetylamino)-2-deoxy-b eta-D-galactopyranosyl]oxy]-1-oxopentyl]amino]propyl]amino] -3-oxopropoxy]methyl]-1,12,19,25-tetraoxo-16-oxa-13,20,24-t riazanonacos-1-yl]-4-hydroxy-2-pyrrolidinyl)methyl ester
acagaagactgggaacatttt

SEQ ID NO: 956 - RNA, 21 nt, synthetic construct
  source 1..21: mol_type = other RNA
  modified_base 1: mod_base = OTHER; note = 2'-O-methyladenosine-3'-phosphorothioate
  modified_base 2: mod_base = OTHER; note = 2'-O-methylcytidine-3'-phosphorothioate
  modified_base 3: mod_base = OTHER; note = 2'-O-methyluridine-3'-phosphate
  modified_base 4: mod_base = OTHER; note = 2'-O-methylguanosine-3'-phosphate
  modified_base 5: mod_base = OTHER; note = 2'-O-methylguanosine-3'-phosphate
  modified_base 6: mod_base = OTHER; note = 2'-O-methylguanosine-3'-phosphate
  modified_base 7: mod_base = OTHER; note = 2'-deoxy-2'-fluoroadenosine-3'-phosphate
  modified_base 8: mod_base = OTHER; note = 2'-O-methyladenosine-3'-phosphate
  modified_base 9: mod_base = OTHER; note = 2'-deoxy-2'-fluorocytidine-3'-phosphate
  modified_base 10: mod_base = OTHER; note = 2'-deoxy-2'-fluoroadenosine-3'-phosphate
  modified_base 11: mod_base = OTHER; note = 2'-deoxy-2'-fluorouridine-3'-phosphate
  modified_base 12: mod_base = OTHER; note = 2'-O-methyluridine-3'-phosphate
  modified_base 13: mod_base = OTHER; note = 2'-O-methyluridine-3'-phosphate
  modified_base 14: mod_base = OTHER; note = 2'-O-methylguanosine-3'-phosphate
  modified_base 15: mod_base = OTHER; note = 2'-O-methyladenosine-3'-phosphate
  modified_base 16: mod_base = OTHER; note = 2'-O-methyladenosine-3'-phosphate
  modified_base 17: mod_base = OTHER; note = 2'-O-methylguanosine-3'-phosphate
  modified_base 18: mod_base = OTHER; note = 2'-O-methyluridine-3'-phosphate
  modified_base 19: mod_base = OTHER; note = 2'-O-methyluridine-3'-phosphate
  modified_base 20: mod_base = OTHER; note = 2'-O-methylguanosine-3'-phosphate
  modified_base 21: mod_base = OTHER; note = 2'-O-methyluridine-3'-phosphate ((2S,4R)-1-[29-[[2-(acetylamino)-2-deoxy-beta-D-galactopyra nosyl]oxy]-14,14-bis[[3-[[3-[[5-[[2-(acetylamino)-2-deoxy-b eta-D-galactopyranosyl]oxy]-1-oxopentyl]amino]propyl]amino] -3-oxopropoxy]methyl]-1,12,19,25-tetraoxo-16-oxa-13,20,24-t riazanonacos-1-yl]-4-hydroxy-2-pyrrolidinyl)methyl ester
actgggaacatttgaagttgt

SEQ ID NO: 957 - RNA, 21 nt, synthetic construct
  source 1..21: mol_type = other RNA
  modified_base 1: mod_base = OTHER; note = 2'-O-methyladenosine-3'-phosphorothioate
  modified_base 2: mod_base = OTHER; note = 2'-O-methyladenosine-3'-phosphorothioate
  modified_base 3: mod_base = OTHER; note = 2'-O-methylcytidine-3'-phosphate
  modified_base 4: mod_base = OTHER; note = 2'-O-methyladenosine-3'-phosphate
  modified_base 5: mod_base = OTHER; note = 2'-O-methyluridine-3'-phosphate
  modified_base 6: mod_base = OTHER; note = 2'-O-methyluridine-3'-phosphate
  modified_base 7: mod_base = OTHER; note = 2'-deoxy-2'-fluorouridine-3'-phosphate
  modified_base 8: mod_base = OTHER; note = 2'-O-methylguanosine-3'-phosphate
  modified_base 9: mod_base = OTHER; note = 2'-deoxy-2'-fluoroadenosine-3'-phosphate
  modified_base 10: mod_base = OTHER; note = 2'-deoxy-2'-fluoroadenosine-3'-phosphate
  modified_base 11: mod_base = OTHER; note = 2'-deoxy-2'-fluoroguanosine-3'-phosphate
  modified_base 12: mod_base = OTHER; note = 2'-O-methyluridine-3'-phosphate
  modified_base 13: mod_base = OTHER; note = 2'-O-methyluridine-3'-phosphate
  modified_base 14: mod_base = OTHER; note = 2'-O-methylguanosine-3'-phosphate
  modified_base 15: mod_base = OTHER; note = 2'-O-methyladenosine-3'-phosphate
  modified_base 16: mod_base = OTHER; note = 2'-O-methyladenosine-3'-phosphate
  modified_base 17: mod_base = OTHER; note = 2'-O-methylguanosine-3'-phosphate
  modified_base 18: mod_base = OTHER; note = 2'-O-methyladenosine-3'-phosphate
  modified_base 19: mod_base = OTHER; note = 2'-O-methyluridine-3'-phosphate
  modified_base 20: mod_base = OTHER; note = 2'-O-methylcytidine-3'-phosphate
  modified_base 21: mod_base = OTHER; note = 2'-O-methyluridine-3'-phosphate ((2S,4R)-1-[29-[[2-(acetylamino)-2-deoxy-beta-D-galactopyra nosyl]oxy]-14,14-bis[[3-[[3-[[5-[[2-(acetylamino)-2-deoxy-b eta-D-galactopyranosyl]oxy]-1-oxopentyl]amino]propyl]amino] -3-oxopropoxy]methyl]-1,12,19,25-tetraoxo-16-oxa-13,20,24-t riazanonacos-1-yl]-4-hydroxy-2-pyrrolidinyl)methyl ester
aacatttgaagttgaagatct

SEQ ID NO: 958 - RNA, 21 nt, synthetic construct
  source 1..21: mol_type = other RNA
  modified_base 1: mod_base = OTHER; note = 2'-O-methyluridine-3'-phosphorothioate
  modified_base 2: mod_base = OTHER; note = 2'-O-methylguanosine-3'-phosphorothioate
  modified_base 3: mod_base = OTHER; note = 2'-O-methyladenosine-3'-phosphate
  modified_base 4: mod_base = OTHER; note = 2'-O-methyladenosine-3'-phosphate
  modified_base 5: mod_base = OTHER; note = 2'-O-methylguanosine-3'-phosphate
  modified_base 6: mod_base = OTHER; note = 2'-O-methyluridine-3'-phosphate
  modified_base 7: mod_base = OTHER; note = 2'-deoxy-2'-fluorouridine-3'-phosphate
  modified_base 8: mod_base = OTHER; note = 2'-O-methylguanosine-3'-phosphate
  modified_base 9: mod_base = OTHER; note = 2'-deoxy-2'-fluoroadenosine-3'-phosphate
  modified_base 10: mod_base = OTHER; note = 2'-deoxy-2'-fluoroadenosine-3'-phosphate
  modified_base 11: mod_base = OTHER; note = 2'-deoxy-2'-fluoroguanosine-3'-phosphate
  modified_base 12: mod_base = OTHER; note = 2'-O-methyladenosine-3'-phosphate
  modified_base 13: mod_base = OTHER; note = 2'-O-methyluridine-3'-phosphate
  modified_base 14: mod_base = OTHER; note = 2'-O-methylcytidine-3'-phosphate
  modified_base 15: mod_base = OTHER; note = 2'-O-methyladenosine-3'-phosphate
  modified_base 16: mod_base = OTHER; note = 2'-O-methyladenosine-3'-phosphate
  modified_base 17: mod_base = OTHER; note = 2'-O-methyladenosine-3'-phosphate
  modified_base 18: mod_base = OTHER; note = 2'-O-methyluridine-3'-phosphate
  modified_base 19: mod_base = OTHER; note = 2'-O-methyluridine-3'-phosphate
  modified_base 20: mod_base = OTHER; note = 2'-O-methylguanosine-3'-phosphate
  modified_base 21: mod_base = OTHER; note = 2'-O-methyluridine-3'-phosphate ((2S,4R)-1-[29-[[2-(acetylamino)-2-deoxy-beta-D-galactopyra nosyl]oxy]-14,14-bis[[3-[[3-[[5-[[2-(acetylamino)-2-deoxy-b eta-D-galactopyranosyl]oxy]-1-oxopentyl]amino]propyl]amino] -3-oxopropoxy]methyl]-1,12,19,25-tetraoxo-16-oxa-13,20,24-t riazanonacos-1-yl]-4-hydroxy-2-pyrrolidinyl)methyl ester
tgaagttgaagatcaaattgt

SEQ ID NO: 959 - RNA, 21 nt, synthetic construct
  source 1..21: mol_type = other RNA
  modified_base 1: mod_base = OTHER; note = 2'-O-methyluridine-3'-phosphorothioate
  modified_base 2: mod_base = OTHER; note = 2'-O-methylguanosine-3'-phosphorothioate
  modified_base 3: mod_base = OTHER; note = 2'-O-methyladenosine-3'-phosphate
  modified_base 4: mod_base = OTHER; note = 2'-O-methyladenosine-3'-phosphate
  modified_base 5: mod_base = OTHER; note = 2'-O-methylguanosine-3'-phosphate
  modified_base 6: mod_base = OTHER; note = 2'-O-methyladenosine-3'-phosphate
  modified_base 7: mod_base = OTHER; note = 2'-deoxy-2'-fluorouridine-3'-phosphate
  modified_base 8: mod_base = OTHER; note = 2'-O-methylcytidine-3'-phosphate
  modified_base 9: mod_base = OTHER; note = 2'-deoxy-2'-fluoroadenosine-3'-phosphate
  modified_base 10: mod_base = OTHER; note = 2'-deoxy-2'-fluoroadenosine-3'-phosphate
  modified_base 11: mod_base = OTHER; note = 2'-deoxy-2'-fluoroadenosine-3'-phosphate
  modified_base 12: mod_base = OTHER; note = 2'-O-methyluridine-3'-phosphate
  modified_base 13: mod_base = OTHER; note = 2'-O-methyluridine-3'-phosphate
  modified_base 14: mod_base = OTHER; note = 2'-O-methylguanosine-3'-phosphate
  modified_base 15: mod_base = OTHER; note = 2'-O-methyladenosine-3'-phosphate
  modified_base 16: mod_base = OTHER; note = 2'-O-methyladenosine-3'-phosphate
  modified_base 17: mod_base = OTHER; note = 2'-O-methylguanosine-3'-phosphate
  modified_base 18: mod_base = OTHER; note = 2'-O-methylcytidine-3'-phosphate
  modified_base 19: mod_base = OTHER; note = 2'-O-methyladenosine-3'-phosphate
  modified_base 20: mod_base = OTHER; note = 2'-O-methylguanosine-3'-phosphate
  modified_base 21: mod_base = OTHER; note = 2'-O-methyluridine-3'-phosphate ((2S,4R)-1-[29-[[2-(acetylamino)-2-deoxy-beta-D-galactopyra nosyl]oxy]-14,14-bis[[3-[[3-[[5-[[2-(acetylamino)-2-deoxy-b eta-D-galactopyranosyl]oxy]-1-oxopentyl]amino]propyl]amino] -3-oxopropoxy]methyl]-1,12,19,25-tetraoxo-16-oxa-13,20,24-t riazanonacos-1-yl]-4-hydroxy-2-pyrrolidinyl)methyl ester
tgaagatcaaattgaagcagt

SEQ ID NO: 960 - RNA, 21 nt, synthetic construct
  source 1..21: mol_type = other RNA
  modified_base 1: mod_base = OTHER; note = 2'-O-methyladenosine-3'-phosphorothioate
  modified_base 2: mod_base = OTHER; note = 2'-O-methyladenosine-3'-phosphorothioate
  modified_base 3: mod_base = OTHER; note = 2'-O-methyladenosine-3'-phosphate
  modified_base 4: mod_base = OTHER; note = 2'-O-methyluridine-3'-phosphate
  modified_base 5: mod_base = OTHER; note = 2'-O-methyluridine-3'-phosphate
  modified_base 6: mod_base = OTHER; note = 2'-O-methylguanosine-3'-phosphate
  modified_base 7: mod_base = OTHER; note = 2'-deoxy-2'-fluoroadenosine-3'-phosphate
  modified_base 8: mod_base = OTHER; note = 2'-O-methyladenosine-3'-phosphate
  modified_base 9: mod_base = OTHER; note = 2'-deoxy-2'-fluoroguanosine-3'-phosphate
  modified_base 10: mod_base = OTHER; note = 2'-deoxy-2'-fluorocytidine-3'-phosphate
  modified_base 11: mod_base = OTHER; note = 2'-deoxy-2'-fluoroadenosine-3'-phosphate
  modified_base 12: mod_base = OTHER; note = 2'-O-methylguanosine-3'-phosphate
  modified_base 13: mod_base = OTHER; note = 2'-O-methylcytidine-3'-phosphate
  modified_base 14: mod_base = OTHER; note = 2'-O-methylcytidine-3'-phosphate
  modified_base 15: mod_base = OTHER; note = 2'-O-methyladenosine-3'-phosphate
  modified_base 16: mod_base = OTHER; note = 2'-O-methylguanosine-3'-phosphate
  modified_base 17: mod_base = OTHER; note = 2'-O-methyladenosine-3'-phosphate
  modified_base 18: mod_base = OTHER; note = 2'-O-methylcytidine-3'-phosphate
  modified_base 19: mod_base = OTHER; note = 2'-O-methyladenosine-3'-phosphate
  modified_base 20: mod_base = OTHER; note = 2'-O-methyladenosine-3'-phosphate
  modified_base 21: mod_base = OTHER; note = 2'-O-methyluridine-3'-phosphate ((2S,4R)-1-[29-[[2-(acetylamino)-2-deoxy-beta-D-galactopyra nosyl]oxy]-14,14-bis[[3-[[3-[[5-[[2-(acetylamino)-2-deoxy-b eta-D-galactopyranosyl]oxy]-1-oxopentyl]amino]propyl]amino] -3-oxopropoxy]methyl]-1,12,19,25-tetraoxo-16-oxa-13,20,24-t riazanonacos-1-yl]-4-hydroxy-2-pyrrolidinyl)methyl ester
aaattgaagcagccagacaat

SEQ ID NO: 961 - RNA, 21 nt, synthetic construct
  source 1..21: mol_type = other RNA
  modified_base 1: mod_base = OTHER; note = 2'-O-methylguanosine-3'-phosphorothioate
  modified_base 2: mod_base = OTHER; note = 2'-O-methylcytidine-3'-phosphorothioate
  modified_base 3: mod_base = OTHER; note = 2'-O-methyladenosine-3'-phosphate
  modified_base 4: mod_base = OTHER; note = 2'-O-methylguanosine-3'-phosphate
  modified_base 5: mod_base = OTHER; note = 2'-O-methylcytidine-3'-phosphate
  modified_base 6: mod_base = OTHER; note = 2'-O-methylcytidine-3'-phosphate
  modified_base 7: mod_base = OTHER; note = 2'-deoxy-2'-fluoroadenosine-3'-phosphate
  modified_base 8: mod_base = OTHER; note = 2'-O-methylguanosine-3'-phosphate
  modified_base 9: mod_base = OTHER; note = 2'-deoxy-2'-fluoroadenosine-3'-phosphate
  modified_base 10: mod_base = OTHER; note = 2'-deoxy-2'-fluorocytidine-3'-phosphate
  modified_base 11: mod_base = OTHER; note = 2'-deoxy-2'-fluoroadenosine-3'-phosphate
  modified_base 12: mod_base = OTHER; note = 2'-O-methyladenosine-3'-phosphate
  modified_base 13: mod_base = OTHER; note = 2'-O-methyluridine-3'-phosphate
  modified_base 14: mod_base = OTHER; note = 2'-O-methyluridine-3'-phosphate
  modified_base 15: mod_base = OTHER; note = 2'-O-methyluridine-3'-phosphate
  modified_base 16: mod_base = OTHER; note = 2'-O-methyluridine-3'-phosphate
  modified_base 17: mod_base = OTHER; note = 2'-O-methylcytidine-3'-phosphate
  modified_base 18: mod_base = OTHER; note = 2'-O-methyladenosine-3'-phosphate
  modified_base 19: mod_base = OTHER; note = 2'-O-methyladenosine-3'-phosphate
  modified_base 20: mod_base = OTHER; note = 2'-O-methyladenosine-3'-phosphate
  modified_base 21: mod_base = OTHER; note = 2'-O-methyluridine-3'-phosphate ((2S,4R)-1-[29-[[2-(acetylamino)-2-deoxy-beta-D-galactopyra nosyl]oxy]-14,14-bis[[3-[[3-[[5-[[2-(acetylamino)-2-deoxy-b eta-D-galactopyranosyl]oxy]-1-oxopentyl]amino]propyl]amino] -3-oxopropoxy]methyl]-1,12,19,25-tetraoxo-16-oxa-13,20,24-t riazanonacos-1-yl]-4-hydroxy-2-pyrrolidinyl)methyl ester
gcagccagacaattttcaaat

SEQ ID NO: 962 - RNA, 21 nt, synthetic construct
  source 1..21: mol_type = other RNA
  modified_base 1: mod_base = OTHER; note = 2'-O-methylguanosine-3'-phosphorothioate
  modified_base 2: mod_base = OTHER; note = 2'-O-methylguanosine-3'-phosphorothioate
  modified_base 3: mod_base = OTHER; note = 2'-O-methylguanosine-3'-phosphate
  modified_base 4: mod_base = OTHER; note = 2'-O-methyladenosine-3'-phosphate
  modified_base 5: mod_base = OTHER; note = 2'-O-methyluridine-3'-phosphate
  modified_base 6: mod_base = OTHER; note = 2'-O-methyluridine-3'-phosphate
  modified_base 7: mod_base = OTHER; note = 2'-deoxy-2'-fluorouridine-3'-phosphate
  modified_base 8: mod_base = OTHER; note = 2'-O-methylguanosine-3'-phosphate
  modified_base 9: mod_base = OTHER; note = 2'-deoxy-2'-fluorouridine-3'-phosphate
  modified_base 10: mod_base = OTHER; note = 2'-deoxy-2'-fluoroguanosine-3'-phosphate
  modified_base 11: mod_base = OTHER; note = 2'-deoxy-2'-fluoroguanosine-3'-phosphate
  modified_base 12: mod_base = OTHER; note = 2'-O-methyladenosine-3'-phosphate
  modified_base 13: mod_base = OTHER; note = 2'-O-methylcytidine-3'-phosphate
  modified_base 14: mod_base = OTHER; note = 2'-O-methyladenosine-3'-phosphate
  modified_base 15: mod_base = OTHER; note = 2'-O-methyladenosine-3'-phosphate
  modified_base 16: mod_base = OTHER; note = 2'-O-methylcytidine-3'-phosphate
  modified_base 17: mod_base = OTHER; note = 2'-O-methyladenosine-3'-phosphate
  modified_base 18: mod_base = OTHER; note = 2'-O-methyladenosine-3'-phosphate
  modified_base 19: mod_base = OTHER; note = 2'-O-methyladenosine-3'-phosphate
  modified_base 20: mod_base = OTHER; note = 2'-O-methylcytidine-3'-phosphate
  modified_base 21: mod_base = OTHER; note = 2'-O-methyluridine-3'-phosphate ((2S,4R)-1-[29-[[2-(acetylamino)-2-deoxy-beta-D-galactopyra nosyl]oxy]-14,14-bis[[3-[[3-[[5-[[2-(acetylamino)-2-deoxy-b eta-D-galactopyranosyl]oxy]-1-oxopentyl]amino]propyl]amino] -3-oxopropoxy]methyl]-1,12,19,25-tetraoxo-16-oxa-13,20,24-t riazanonacos-1-yl]-4-hydroxy-2-pyrrolidinyl)methyl ester
gggatttgtggacaacaaact

SEQ ID NO: 963 - RNA, 21 nt, synthetic construct
  source 1..21: mol_type = other RNA
  modified_base 1: mod_base = OTHER; note = 2'-O-methyluridine-3'-phosphorothioate
  modified_base 2: mod_base = OTHER; note = 2'-O-methylguanosine-3'-phosphorothioate
  modified_base 3: mod_base = OTHER; note = 2'-O-methyluridine-3'-phosphate
  modified_base 4: mod_base = OTHER; note = 2'-O-methylguanosine-3'-phosphate
  modified_base 5: mod_base = OTHER; note = 2'-O-methylguanosine-3'-phosphate
  modified_base 6: mod_base = OTHER; note = 2'-O-methyladenosine-3'-phosphate
  modified_base 7: mod_base = OTHER; note = 2'-deoxy-2'-fluorocytidine-3'-phosphate
  modified_base 8: mod_base = OTHER; note = 2'-O-methyladenosine-3'-phosphate
  modified_base 9: mod_base = OTHER; note = 2'-deoxy-2'-fluoroadenosine-3'-phosphate
  modified_base 10: mod_base = OTHER; note = 2'-deoxy-2'-fluorocytidine-3'-phosphate
  modified_base 11: mod_base = OTHER; note = 2'-deoxy-2'-fluoroadenosine-3'-phosphate
  modified_base 12: mod_base = OTHER; note = 2'-O-methyladenosine-3'-phosphate
  modified_base 13: mod_base = OTHER; note = 2'-O-methyladenosine-3'-phosphate
  modified_base 14: mod_base = OTHER; note = 2'-O-methylcytidine-3'-phosphate
  modified_base 15: mod_base = OTHER; note = 2'-O-methylguanosine-3'-phosphate
  modified_base 16: mod_base = OTHER; note = 2'-O-methyladenosine-3'-phosphate
  modified_base 17: mod_base = OTHER; note = 2'-O-methyladenosine-3'-phosphate
  modified_base 18: mod_base = OTHER; note = 2'-O-methyluridine-3'-phosphate
  modified_base 19: mod_base = OTHER; note = 2'-O-methyluridine-3'-phosphate
  modified_base 20: mod_base = OTHER; note = 2'-O-methylguanosine-3'-phosphate
  modified_base 21: mod_base = OTHER; note = 2'-O-methyluridine-3'-phosphate ((2S,4R)-1-[29-[[2-(acetylamino)-2-deoxy-beta-D-galactopyra nosyl]oxy]-14,14-bis[[3-[[3-[[5-[[2-(acetylamino)-2-deoxy-b eta-D-galactopyranosyl]oxy]-1-oxopentyl]amino]propyl]amino] -3-oxopropoxy]methyl]-1,12,19,25-tetraoxo-16-oxa-13,20,24-t riazanonacos-1-yl]-4-hydroxy-2-pyrrolidinyl)methyl ester
tgtggacaacaaacgaattgt

SEQ ID NO: 964 - RNA, 21 nt, synthetic construct
  source 1..21: mol_type = other RNA
  modified_base 1: mod_base = OTHER; note = 2'-O-methyladenosine-3'-phosphorothioate
  modified_base 2: mod_base = OTHER; note = 2'-O-methyladenosine-3'-phosphorothioate
  modified_base 3: mod_base = OTHER; note = 2'-O-methylcytidine-3'-phosphate
  modified_base 4: mod_base = OTHER; note = 2'-O-methyladenosine-3'-phosphate
  modified_base 5: mod_base = OTHER; note = 2'-O-methyladenosine-3'-phosphate
  modified_base 6: mod_base = OTHER; note = 2'-O-methyladenosine-3'-phosphate
  modified_base 7: mod_base = OTHER; note = 2'-deoxy-2'-fluorocytidine-3'-phosphate
  modified_base 8: mod_base = OTHER; note = 2'-O-methylguanosine-3'-phosphate
  modified_base 9: mod_base = OTHER; note = 2'-deoxy-2'-fluoroadenosine-3'-phosphate
  modified_base 10: mod_base = OTHER; note = 2'-deoxy-2'-fluoroadenosine-3'-phosphate
  modified_base 11: mod_base = OTHER; note = 2'-deoxy-2'-fluorouridine-3'-phosphate
  modified_base 12: mod_base = OTHER; note = 2'-O-methyluridine-3'-phosphate
  modified_base 13: mod_base = OTHER; note = 2'-O-methylguanosine-3'-phosphate
  modified_base 14: mod_base = OTHER; note = 2'-O-methylcytidine-3'-phosphate
  modified_base 15: mod_base = OTHER; note = 2'-O-methyladenosine-3'-phosphate
  modified_base 16: mod_base = OTHER; note = 2'-O-methyladenosine-3'-phosphate
  modified_base 17: mod_base = OTHER; note = 2'-O-methyluridine-3'-phosphate
  modified_base 18: mod_base = OTHER; note = 2'-O-methyluridine-3'-phosphate
  modified_base 19: mod_base = OTHER; note = 2'-O-methyluridine-3'-phosphate
  modified_base 20: mod_base = OTHER; note = 2'-O-methylguanosine-3'-phosphate
  modified_base 21: mod_base = OTHER; note = 2'-O-methyluridine-3'-phosphate ((2S,4R)-1-[29-[[2-(acetylamino)-2-deoxy-beta-D-galactopyra nosyl]oxy]-14,14-bis[[3-[[3-[[5-[[2-(acetylamino)-2-deoxy-b eta-D-galactopyranosyl]oxy]-1-oxopentyl]amino]propyl]amino] -3-oxopropoxy]methyl]-1,12,19,25-tetraoxo-16-oxa-13,20,24-t riazanonacos-1-yl]-4-hydroxy-2-pyrrolidinyl)methyl ester
aacaaacgaattgcaatttgt

SEQ ID NO: 965 - RNA, 21 nt, synthetic construct
  source 1..21: mol_type = other RNA
  modified_base 1: mod_base = OTHER; note = 2'-O-methylguanosine-3'-phosphorothioate
  modified_base 2: mod_base = OTHER; note = 2'-O-methylguanosine-3'-phosphorothioate
  modified_base 3: mod_base = OTHER; note = 2'-O-methyluridine-3'-phosphate
  modified_base 4: mod_base = OTHER; note = 2'-O-methylcytidine-3'-phosphate
  modified_base 5: mod_base = OTHER; note = 2'-O-methyladenosine-3'-phosphate
  modified_base 6: mod_base = OTHER; note = 2'-O-methyluridine-3'-phosphate
  modified_base 7: mod_base = OTHER; note = 2'-deoxy-2'-fluoroadenosine-3'-phosphate
  modified_base 8: mod_base = OTHER; note = 2'-O-methyluridine-3'-phosphate
  modified_base 9: mod_base = OTHER; note = 2'-deoxy-2'-fluoroguanosine-3'-phosphate
  modified_base 10: mod_base = OTHER; note = 2'-deoxy-2'-fluoroguanosine-3'-phosphate
  modified_base 11: mod_base = OTHER; note = 2'-deoxy-2'-fluoroadenosine-3'-phosphate
  modified_base 12: mod_base = OTHER; note = 2'-O-methylguanosine-3'-phosphate
  modified_base 13: mod_base = OTHER; note = 2'-O-methylguanosine-3'-phosphate
  modified_base 14: mod_base = OTHER; note = 2'-O-methylguanosine-3'-phosphate
  modified_base 15: mod_base = OTHER; note = 2'-O-methyluridine-3'-phosphate
  modified_base 16: mod_base = OTHER; note = 2'-O-methyladenosine-3'-phosphate
  modified_base 17: mod_base = OTHER; note = 2'-O-methylcytidine-3'-phosphate
  modified_base 18: mod_base = OTHER; note = 2'-O-methylguanosine-3'-phosphate
  modified_base 19: mod_base = OTHER; note = 2'-O-methyluridine-3'-phosphate
  modified_base 20: mod_base = OTHER; note = 2'-O-methyladenosine-3'-phosphate
  modified_base 21: mod_base = OTHER; note = 2'-O-methyluridine-3'-phosphate ((2S,4R)-1-[29-[[2-(acetylamino)-2-deoxy-beta-D-galactopyra nosyl]oxy]-14,14-bis[[3-[[3-[[5-[[2-(acetylamino)-2-deoxy-b eta-D-galactopyranosyl]oxy]-1-oxopentyl]amino]propyl]amino] -3-oxopropoxy]methyl]-1,12,19,25-tetraoxo-16-oxa-13,20,24-t riazanonacos-1-yl]-4-hydroxy-2-pyrrolidinyl)methyl ester
ggtcatatggagggtacgtat

SEQ ID NO: 966 - RNA, 21 nt, synthetic construct
  source 1..21: mol_type = other RNA
  modified_base 1: mod_base = OTHER; note = 2'-O-methylguanosine-3'-phosphorothioate
  modified_base 2: mod_base = OTHER; note = 2'-O-methylguanosine-3'-phosphorothioate
  modified_base 3: mod_base = OTHER; note = 2'-O-methylguanosine-3'-phosphate
  modified_base 4: mod_base = OTHER; note = 2'-O-methyluridine-3'-phosphate
  modified_base 5: mod_base = OTHER; note = 2'-O-methyladenosine-3'-phosphate
  modified_base 6: mod_base = OTHER; note = 2'-O-methylcytidine-3'-phosphate
  modified_base 7: mod_base = OTHER; note = 2'-deoxy-2'-fluoroguanosine-3'-phosphate
  modified_base 8: mod_base = OTHER; note = 2'-O-methyluridine-3'-phosphate
  modified_base 9: mod_base = OTHER; note = 2'-deoxy-2'-fluoroadenosine-3'-phosphate
  modified_base 10: mod_base = OTHER; note = 2'-deoxy-2'-fluoroadenosine-3'-phosphate
  modified_base 11: mod_base = OTHER; note = 2'-deoxy-2'-fluorocytidine-3'-phosphate
  modified_base 12: mod_base = OTHER; note = 2'-O-methylcytidine-3'-phosphate
  modified_base 13: mod_base = OTHER; note = 2'-O-methyluridine-3'-phosphate
  modified_base 14: mod_base = OTHER; note = 2'-O-methylcytidine-3'-phosphate
  modified_base 15: mod_base = OTHER; note = 2'-O-methyladenosine-3'-phosphate
  modified_base 16: mod_base = OTHER; note = 2'-O-methyladenosine-3'-phosphate
  modified_base 17: mod_base = OTHER; note = 2'-O-methyluridine-3'-phosphate
  modified_base 18: mod_base = OTHER; note = 2'-O-methylguanosine-3'-phosphate
  modified_base 19: mod_base = OTHER; note = 2'-O-methylguanosine-3'-phosphate
  modified_base 20: mod_base = OTHER; note = 2'-O-methyluridine-3'-phosphate
  modified_base 21: mod_base = OTHER; note = 2'-O-methyluridine-3'-phosphate ((2S,4R)-1-[29-[[2-(acetylamino)-2-deoxy-beta-D-galactopyra nosyl]oxy]-14,14-bis[[3-[[3-[[5-[[2-(acetylamino)-2-deoxy-b eta-D-galactopyranosyl]oxy]-1-oxopentyl]amino]propyl]amino] -3-oxopropoxy]methyl]-1,12,19,25-tetraoxo-16-oxa-13,20,24-t riazanonacos-1-yl]-4-hydroxy-2-pyrrolidinyl)methyl ester
gggtacgtaacctcaatggtt

SEQ ID NO: 967 - RNA, 21 nt, synthetic construct
  source 1..21: mol_type = other RNA
  modified_base 1: mod_base = OTHER; note = 2'-O-methyladenosine-3'-phosphorothioate
  modified_base 2: mod_base = OTHER; note = 2'-O-methyluridine-3'-phosphorothioate
  modified_base 3: mod_base = OTHER; note = 2'-O-methylcytidine-3'-phosphate
  modified_base 4: mod_base = OTHER; note = 2'-O-methylguanosine-3'-phosphate
  modified_base 5: mod_base = OTHER; note = 2'-O-methylguanosine-3'-phosphate
  modified_base 6: mod_base = OTHER; note = 2'-O-methylguanosine-3'-phosphate
  modified_base 7: mod_base = OTHER; note = 2'-deoxy-2'-fluoroadenosine-3'-phosphate
  modified_base 8: mod_base = OTHER; note = 2'-O-methyladenosine-3'-phosphate
  modified_base 9: mod_base = OTHER; note = 2'-deoxy-2'-fluoroguanosine-3'-phosphate
  modified_base 10: mod_base = OTHER; note = 2'-deoxy-2'-fluorouridine-3'-phosphate
  modified_base 11: mod_base = OTHER; note = 2'-deoxy-2'-fluoroguanosine-3'-phosphate
  modified_base 12: mod_base = OTHER; note = 2'-O-methylguanosine-3'-phosphate
  modified_base 13: mod_base = OTHER; note = 2'-O-methylcytidine-3'-phosphate
  modified_base 14: mod_base = OTHER; note = 2'-O-methylguanosine-3'-phosphate
  modified_base 15: mod_base = OTHER; note = 2'-O-methyluridine-3'-phosphate
  modified_base 16: mod_base = OTHER; note = 2'-O-methylguanosine-3'-phosphate
  modified_base 17: mod_base = OTHER; note = 2'-O-methyluridine-3'-phosphate
  modified_base 18: mod_base = OTHER; note = 2'-O-methyluridine-3'-phosphate
  modified_base 19: mod_base = OTHER; note = 2'-O-methylcytidine-3'-phosphate
  modified_base 20: mod_base = OTHER; note = 2'-O-methyladenosine-3'-phosphate
  modified_base 21: mod_base = OTHER; note = 2'-O-methyluridine-3'-phosphate ((2S,4R)-1-[29-[[2-(acetylamino)-2-deoxy-beta-D-galactopyra nosyl]oxy]-14,14-bis[[3-[[3-[[5-[[2-(acetylamino)-2-deoxy-b eta-D-galactopyranosyl]oxy]-1-oxopentyl]amino]propyl]amino] -3-oxopropoxy]methyl]-1,12,19,25-tetraoxo-16-oxa-13,20,24-t riazanonacos-1-yl]-4-hydroxy-2-pyrrolidinyl)methyl ester
atcgggaagtggcgtgttcat

SEQ ID NO: 968 - RNA, 21 nt, synthetic construct
  source 1..21: mol_type = other RNA
  modified_base 1: mod_base = OTHER; note = 2'-O-methyluridine-3'-phosphorothioate
  modified_base 2: mod_base = OTHER; note = 2'-O-methylguanosine-3'-phosphorothioate
  modified_base 3: mod_base = OTHER; note = 2'-O-methylguanosine-3'-phosphate
  modified_base 4: mod_base = OTHER; note = 2'-O-methylcytidine-3'-phosphate
  modified_base 5: mod_base = OTHER; note = 2'-O-methylguanosine-3'-phosphate
  modified_base 6: mod_base = OTHER; note = 2'-O-methyluridine-3'-phosphate
  modified_base 7: mod_base = OTHER; note = 2'-deoxy-2'-fluoroguanosine-3'-phosphate
  modified_base 8: mod_base = OTHER; note = 2'-O-methyluridine-3'-phosphate
  modified_base 9: mod_base = OTHER; note = 2'-deoxy-2'-fluorouridine-3'-phosphate
  modified_base 10: mod_base = OTHER; note = 2'-deoxy-2'-fluorocytidine-3'-phosphate
  modified_base 11: mod_base = OTHER; note = 2'-deoxy-2'-fluoroadenosine-3'-phosphate
  modified_base 12: mod_base = OTHER; note = 2'-O-methyladenosine-3'-phosphate
  modified_base 13: mod_base = OTHER; note = 2'-O-methylguanosine-3'-phosphate
  modified_base 14: mod_base = OTHER; note = 2'-O-methyluridine-3'-phosphate
  modified_base 15: mod_base = OTHER; note = 2'-O-methylguanosine-3'-phosphate
  modified_base 16: mod_base = OTHER; note = 2'-O-methyluridine-3'-phosphate
  modified_base 17: mod_base = OTHER; note = 2'-O-methylguanosine-3'-phosphate
  modified_base 18: mod_base = OTHER; note = 2'-O-methylguanosine-3'-phosphate
  modified_base 19: mod_base = OTHER; note = 2'-O-methyladenosine-3'-phosphate
  modified_base 20: mod_base = OTHER; note = 2'-O-methyladenosine-3'-phosphate
  modified_base 21: mod_base = OTHER; note = 2'-O-methyluridine-3'-phosphate ((2S,4R)-1-[29-[[2-(acetylamino)-2-deoxy-beta-D-galactopyra nosyl]oxy]-14,14-bis[[3-[[3-[[5-[[2-(acetylamino)-2-deoxy-b eta-D-galactopyranosyl]oxy]-1-oxopentyl]amino]propyl]amino] -3-oxopropoxy]methyl]-1,12,19,25-tetraoxo-16-oxa-13,20,24-t riazanonacos-1-yl]-4-hydroxy-2-pyrrolidinyl)methyl ester
tggcgtgttcaagtgtggaat

SEQ ID NO: 969 - RNA, 21 nt, synthetic construct
  source 1..21: mol_type = other RNA
  modified_base 1: mod_base = OTHER; note = 2'-O-methyluridine-3'-phosphorothioate
  modified_base 2: mod_base = OTHER; note = 2'-O-methyluridine-3'-phosphorothioate
  modified_base 3: mod_base = OTHER; note = 2'-O-methylcytidine-3'-phosphate
  modified_base 4: mod_base = OTHER; note = 2'-O-methyladenosine-3'-phosphate
  modified_base 5: mod_base = OTHER; note = 2'-O-methyladenosine-3'-phosphate
  modified_base 6: mod_base = OTHER; note = 2'-O-methylguanosine-3'-phosphate
  modified_base 7: mod_base = OTHER; note = 2'-deoxy-2'-fluorouridine-3'-phosphate
  modified_base 8: mod_base = OTHER; note = 2'-O-methylguanosine-3'-phosphate
  modified_base 9: mod_base = OTHER; note = 2'-deoxy-2'-fluorouridine-3'-phosphate
  modified_base 10: mod_base = OTHER; note = 2'-deoxy-2'-fluoroguanosine-3'-phosphate
  modified_base 11: mod_base = OTHER; note = 2'-deoxy-2'-fluoroguanosine-3'-phosphate
  modified_base 12: mod_base = OTHER; note = 2'-O-methyladenosine-3'-phosphate
  modified_base 13: mod_base = OTHER; note = 2'-O-methyladenosine-3'-phosphate
  modified_base 14: mod_base = OTHER; note = 2'-O-methyluridine-3'-phosphate
  modified_base 15: mod_base = OTHER; note = 2'-O-methyladenosine-3'-phosphate
  modified_base 16: mod_base = OTHER; note = 2'-O-methylguanosine-3'-phosphate
  modified_base 17: mod_base = OTHER; note = 2'-O-methylcytidine-3'-phosphate
  modified_base 18: mod_base = OTHER; note = 2'-O-methylcytidine-3'-phosphate
  modified_base 19: mod_base = OTHER; note = 2'-O-methylguanosine-3'-phosphate
  modified_base 20: mod_base = OTHER; note = 2'-O-methyluridine-3'-phosphate
  modified_base 21: mod_base = OTHER; note = 2'-O-methyluridine-3'-phosphate ((2S,4R)-1-[29-[[2-(acetylamino)-2-deoxy-beta-D-galactopyra nosyl]oxy]-14,14-bis[[3-[[3-[[5-[[2-(acetylamino)-2-deoxy-b eta-D-galactopyranosyl]oxy]-1-oxopentyl]amino]propyl]amino] -3-oxopropoxy]methyl]-1,12,19,25-tetraoxo-16-oxa-13,20,24-t riazanonacos-1-yl]-4-hydroxy-2-pyrrolidinyl)methyl ester
ttcaagtgtggaatagccgtt

SEQ ID NO: 970 - RNA, 21 nt, synthetic construct
  source 1..21: mol_type = other RNA
  modified_base 1: mod_base = OTHER; note = 2'-O-methyluridine-3'-phosphorothioate
  modified_base 2: mod_base = OTHER; note = 2'-O-methylguanosine-3'-phosphorothioate
  modified_base 3: mod_base = OTHER; note = 2'-O-methylguanosine-3'-phosphate
  modified_base 4: mod_base = OTHER; note = 2'-O-methylguanosine-3'-phosphate
  modified_base 5: mod_base = OTHER; note = 2'-O-methyladenosine-3'-phosphate
  modified_base 6: mod_base = OTHER; note = 2'-O-methylguanosine-3'-phosphate
  modified_base 7: mod_base = OTHER; note = 2'-deoxy-2'-fluorouridine-3'-phosphate
  modified_base 8: mod_base = OTHER; note = 2'-O-methyladenosine-3'-phosphate
  modified_base 9: mod_base = OTHER; note = 2'-deoxy-2'-fluorocytidine-3'-phosphate
  modified_base 10: mod_base = OTHER; note = 2'-deoxy-2'-fluorouridine-3'-phosphate
  modified_base 11: mod_base = OTHER; note = 2'-deoxy-2'-fluoroadenosine-3'-phosphate
  modified_base 12: mod_base = OTHER; note = 2'-O-methyluridine-3'-phosphate
  modified_base 13: mod_base = OTHER; note = 2'-O-methylguanosine-3'-phosphate
  modified_base 14: mod_base = OTHER; note = 2'-O-methyladenosine-3'-phosphate
  modified_base 15: mod_base = OTHER; note = 2'-O-methylcytidine-3'-phosphate
  modified_base 16: mod_base = OTHER; note = 2'-O-methyluridine-3'-phosphate
  modified_base 17: mod_base = OTHER; note = 2'-O-methylcytidine-3'-phosphate
  modified_base 18: mod_base = OTHER; note = 2'-O-methyladenosine-3'-phosphate
  modified_base 19: mod_base = OTHER; note = 2'-O-methylguanosine-3'-phosphate
  modified_base 20: mod_base = OTHER; note = 2'-O-methyluridine-3'-phosphate
  modified_base 21: mod_base = OTHER; note = 2'-O-methyluridine-3'-phosphate ((2S,4R)-1-[29-[[2-(acetylamino)-2-deoxy-beta-D-galactopyra nosyl]oxy]-14,14-bis[[3-[[3-[[5-[[2-(acetylamino)-2-deoxy-b eta-D-galactopyranosyl]oxy]-1-oxopentyl]amino]propyl]amino] -3-oxopropoxy]methyl]-1,12,19,25-tetraoxo-16-oxa-13,20,24-t riazanonacos-1-yl]-4-hydroxy-2-pyrrolidinyl)methyl ester
tgggagtactatgactcagtt

SEQ ID NO: 971 - RNA, 21 nt, synthetic construct
  source 1..21: mol_type = other RNA
  modified_base 1: mod_base = OTHER; note = 2'-O-methyladenosine-3'-phosphorothioate
  modified_base 2: mod_base = OTHER; note = 2'-O-methyluridine-3'-phosphorothioate
  modified_base 3: mod_base = OTHER; note = 2'-O-methylguanosine-3'-phosphate
  modified_base 4: mod_base = OTHER; note = 2'-O-methyladenosine-3'-phosphate
  modified_base 5: mod_base = OTHER; note = 2'-O-methylcytidine-3'-phosphate
  modified_base 6: mod_base = OTHER; note = 2'-O-methyluridine-3'-phosphate
  modified_base 7: mod_base = OTHER; note = 2'-deoxy-2'-fluorocytidine-3'-phosphate
  modified_base 8: mod_base = OTHER; note = 2'-O-methyladenosine-3'-phosphate
  modified_base 9: mod_base = OTHER; note = 2'-deoxy-2'-fluoroguanosine-3'-phosphate
  modified_base 10: mod_base = OTHER; note = 2'-deoxy-2'-fluorouridine-3'-phosphate
  modified_base 11: mod_base = OTHER; note = 2'-deoxy-2'-fluoroguanosine-3'-phosphate
  modified_base 12: mod_base = OTHER; note = 2'-O-methyluridine-3'-phosphate
  modified_base 13: mod_base = OTHER; note = 2'-O-methyladenosine-3'-phosphate
  modified_base 14: mod_base = OTHER; note = 2'-O-methylcytidine-3'-phosphate
  modified_base 15: mod_base = OTHER; note = 2'-O-methyladenosine-3'-phosphate
  modified_base 16: mod_base = OTHER; note = 2'-O-methylcytidine-3'-phosphate
  modified_base 17: mod_base = OTHER; note = 2'-O-methyladenosine-3'-phosphate
  modified_base 18: mod_base = OTHER; note = 2'-O-methylguanosine-3'-phosphate
  modified_base 19: mod_base = OTHER; note = 2'-O-methyladenosine-3'-phosphate
  modified_base 20: mod_base = OTHER; note = 2'-O-methyladenosine-3'-phosphate
  modified_base 21: mod_base = OTHER; note = 2'-O-methyluridine-3'-phosphate ((2S,4R)-1-[29-[[2-(acetylamino)-2-deoxy-beta-D-galactopyra nosyl]oxy]-14,14-bis[[3-[[3-[[5-[[2-(acetylamino)-2-deoxy-b eta-D-galactopyranosyl]oxy]-1-oxopentyl]amino]propyl]amino] -3-oxopropoxy]methyl]-1,12,19,25-tetraoxo-16-oxa-13,20,24-t riazanonacos-1-yl]-4-hydroxy-2-pyrrolidinyl)methyl ester
atgactcagtgtacacagaat

SEQ ID NO: 972 - RNA, 21 nt, synthetic construct
  source 1..21: mol_type = other RNA
  modified_base 1: mod_base = OTHER; note = 2'-O-methylguanosine-3'-phosphorothioate
  modified_base 2: mod_base = OTHER; note = 2'-O-methyluridine-3'-phosphorothioate
  modified_base 3: mod_base = OTHER; note = 2'-O-methylguanosine-3'-phosphate
  modified_base 4: mod_base = OTHER; note = 2'-O-methyluridine-3'-phosphate
  modified_base 5: mod_base = OTHER; note = 2'-O-methyladenosine-3'-phosphate
  modified_base 6: mod_base = OTHER; note = 2'-O-methylcytidine-3'-phosphate
  modified_base 7: mod_base = OTHER; note = 2'-deoxy-2'-fluoroadenosine-3'-phosphate
  modified_base 8: mod_base = OTHER; note = 2'-O-methylcytidine-3'-phosphate
  modified_base 9: mod_base = OTHER; note = 2'-deoxy-2'-fluoroadenosine-3'-phosphate
  modified_base 10: mod_base = OTHER; note = 2'-deoxy-2'-fluoroguanosine-3'-phosphate
  modified_base 11: mod_base = OTHER; note = 2'-deoxy-2'-fluoroadenosine-3'-phosphate
  modified_base 12: mod_base = OTHER; note = 2'-O-methyladenosine-3'-phosphate
  modified_base 13: mod_base = OTHER; note = 2'-O-methylcytidine-3'-phosphate
  modified_base 14: mod_base = OTHER; note = 2'-O-methylguanosine-3'-phosphate
  modified_base 15: mod_base = OTHER; note = 2'-O-methyluridine-3'-phosphate
  modified_base 16: mod_base = OTHER; note = 2'-O-methyluridine-3'-phosphate
  modified_base 17: mod_base = OTHER; note = 2'-O-methyladenosine-3'-phosphate
  modified_base 18: mod_base = OTHER; note = 2'-O-methylcytidine-3'-phosphate
  modified_base 19: mod_base = OTHER; note = 2'-O-methyladenosine-3'-phosphate
  modified_base 20: mod_base = OTHER; note = 2'-O-methyluridine-3'-phosphate
  modified_base 21: mod_base = OTHER; note = 2'-O-methyluridine-3'-phosphate ((2S,4R)-1-[29-[[2-(acetylamino)-2-deoxy-beta-D-galactopyra nosyl]oxy]-14,14-bis[[3-[[3-[[5-[[2-(acetylamino)-2-deoxy-b eta-D-galactopyranosyl]oxy]-1-oxopentyl]amino]propyl]amino] -3-oxopropoxy]methyl]-1,12,19,25-tetraoxo-16-oxa-13,20,24-t riazanonacos-1-yl]-4-hydroxy-2-pyrrolidinyl)methyl ester
gtgtacacagaacgttacatt

SEQ ID NO: 973 - RNA, 21 nt, synthetic construct
  source 1..21: mol_type = other RNA
  modified_base 1: mod_base = OTHER; note = 2'-O-methyladenosine-3'-phosphorothioate
  modified_base 2: mod_base = OTHER; note = 2'-O-methylcytidine-3'-phosphorothioate
  modified_base 3: mod_base = OTHER; note = 2'-O-methyladenosine-3'-phosphate
  modified_base 4: mod_base = OTHER; note = 2'-O-methylguanosine-3'-phosphate
  modified_base 5: mod_base = OTHER; note = 2'-O-methyladenosine-3'-phosphate
  modified_base 6: mod_base = OTHER; note = 2'-O-methyladenosine-3'-phosphate
  modified_base 7: mod_base = OTHER; note = 2'-deoxy-2'-fluorocytidine-3'-phosphate
  modified_base 8: mod_base = OTHER; note = 2'-O-methylguanosine-3'-phosphate
  modified_base 9: mod_base = OTHER; note = 2'-deoxy-2'-fluorouridine-3'-phosphate
  modified_base 10: mod_base = OTHER; note = 2'-deoxy-2'-fluorouridine-3'-phosphate
  modified_base 11: mod_base = OTHER; note = 2'-deoxy-2'-fluoroadenosine-3'-phosphate
  modified_base 12: mod_base = OTHER; note = 2'-O-methylcytidine-3'-phosphate
  modified_base 13: mod_base = OTHER; note = 2'-O-methyladenosine-3'-phosphate
  modified_base 14: mod_base = OTHER; note = 2'-O-methyluridine-3'-phosphate
  modified_base 15: mod_base = OTHER; note = 2'-O-methylguanosine-3'-phosphate
  modified_base 16: mod_base = OTHER; note = 2'-O-methylguanosine-3'-phosphate
  modified_base 17: mod_base = OTHER; note = 2'-O-methylguanosine-3'-phosphate
  modified_base 18: mod_base = OTHER; note = 2'-O-methyluridine-3'-phosphate
  modified_base 19: mod_base = OTHER; note = 2'-O-methylcytidine-3'-phosphate
  modified_base 20: mod_base = OTHER; note = 2'-O-methyluridine-3'-phosphate
  modified_base 21: mod_base = OTHER; note = 2'-O-methyluridine-3'-phosphate ((2S,4R)-1-[29-[[2-(acetylamino)-2-deoxy-beta-D-galactopyra nosyl]oxy]-14,14-bis[[3-[[3-[[5-[[2-(acetylamino)-2-deoxy-b eta-D-galactopyranosyl]oxy]-1-oxopentyl]amino]propyl]amino] -3-oxopropoxy]methyl]-1,12,19,25-tetraoxo-16-oxa-13,20,24-t riazanonacos-1-yl]-4-hydroxy-2-pyrrolidinyl)methyl ester
acagaacgttacatgggtctt

SEQ ID NO: 974 - RNA, 21 nt, synthetic construct
  source 1..21: mol_type = other RNA
  modified_base 1: mod_base = OTHER; note = 2'-O-methylguanosine-3'-phosphorothioate
  modified_base 2: mod_base = OTHER; note = 2'-O-methyluridine-3'-phosphorothioate
  modified_base 3: mod_base = OTHER; note = 2'-O-methyluridine-3'-phosphate
  modified_base 4: mod_base = OTHER; note = 2'-O-methyladenosine-3'-phosphate
  modified_base 5: mod_base = OTHER; note = 2'-O-methylcytidine-3'-phosphate
  modified_base 6: mod_base = OTHER; note = 2'-O-methyladenosine-3'-phosphate
  modified_base 7: mod_base = OTHER; note = 2'-deoxy-2'-fluorouridine-3'-phosphate
  modified_base 8: mod_base = OTHER; note = 2'-O-methylguanosine-3'-phosphate
  modified_base 9: mod_base = OTHER; note = 2'-deoxy-2'-fluoroguanosine-3'-phosphate
  modified_base 10: mod_base = OTHER; note = 2'-deoxy-2'-fluoroguanosine-3'-phosphate
  modified_base 11: mod_base = OTHER; note = 2'-deoxy-2'-fluorouridine-3'-phosphate
  modified_base 12: mod_base = OTHER; note = 2'-O-methylcytidine-3'-phosphate
  modified_base 13: mod_base = OTHER; note = 2'-O-methyluridine-3'-phosphate
  modified_base 14: mod_base = OTHER; note = 2'-O-methylcytidine-3'-phosphate
  modified_base 15: mod_base = OTHER; note = 2'-O-methylcytidine-3'-phosphate
  modified_base 16: mod_base = OTHER; note = 2'-O-methylcytidine-3'-phosphate
  modified_base 17: mod_base = OTHER; note = 2'-O-methyladenosine-3'-phosphate
  modified_base 18: mod_base = OTHER; note = 2'-O-methyladenosine-3'-phosphate
  modified_base 19: mod_base = OTHER; note = 2'-O-methylcytidine-3'-phosphate
  modified_base 20: mod_base = OTHER; note = 2'-O-methyluridine-3'-phosphate
  modified_base 21: mod_base = OTHER; note = 2'-O-methyluridine-3'-phosphate ((2S,4R)-1-[29-[[2-(acetylamino)-2-deoxy-beta-D-galactopyra nosyl]oxy]-14,14-bis[[3-[[3-[[5-[[2-(acetylamino)-2-deoxy-b eta-D-galactopyranosyl]oxy]-1-oxopentyl]amino]propyl]amino] -3-oxopropoxy]methyl]-1,12,19,25-tetraoxo-16-oxa-13,20,24-t riazanonacos-1-yl]-4-hydroxy-2-pyrrolidinyl)methyl ester
gttacatgggtctcccaactt

SEQ ID NO: 975 - RNA, 21 nt, synthetic construct
  source 1..21: mol_type = other RNA
  modified_base 1: mod_base = OTHER; note = 2'-O-methylguanosine-3'-phosphorothioate
  modified_base 2: mod_base = OTHER; note = 2'-O-methylguanosine-3'-phosphorothioate
  modified_base 3: mod_base = OTHER; note = 2'-O-methyluridine-3'-phosphate
  modified_base 4: mod_base = OTHER; note = 2'-O-methylcytidine-3'-phosphate
  modified_base 5: mod_base = OTHER; note = 2'-O-methyluridine-3'-phosphate
  modified_base 6: mod_base = OTHER; note = 2'-O-methylcytidine-3'-phosphate
  modified_base 7: mod_base = OTHER; note = 2'-deoxy-2'-fluorocytidine-3'-phosphate
  modified_base 8: mod_base = OTHER; note = 2'-O-methylcytidine-3'-phosphate
  modified_base 9: mod_base = OTHER; note = 2'-deoxy-2'-fluoroadenosine-3'-phosphate
  modified_base 10: mod_base = OTHER; note = 2'-deoxy-2'-fluoroadenosine-3'-phosphate
  modified_base 11: mod_base = OTHER; note = 2'-deoxy-2'-fluorocytidine-3'-phosphate
  modified_base 12: mod_base = OTHER; note = 2'-O-methyluridine-3'-phosphate
  modified_base 13: mod_base = OTHER; note = 2'-O-methylcytidine-3'-phosphate
  modified_base 14: mod_base = OTHER; note = 2'-O-methylcytidine-3'-phosphate
  modified_base 15: mod_base = OTHER; note = 2'-O-methyladenosine-3'-phosphate
  modified_base 16: mod_base = OTHER; note = 2'-O-methylguanosine-3'-phosphate
  modified_base 17: mod_base = OTHER; note = 2'-O-methyladenosine-3'-phosphate
  modified_base 18: mod_base = OTHER; note = 2'-O-methyladenosine-3'-phosphate
  modified_base 19: mod_base = OTHER; note = 2'-O-methylguanosine-3'-phosphate
  modified_base 20: mod_base = OTHER; note = 2'-O-methyladenosine-3'-phosphate
  modified_base 21: mod_base = OTHER; note = 2'-O-methyluridine-3'-phosphate ((2S,4R)-1-[29-[[2-(acetylamino)-2-deoxy-beta-D-galactopyra nosyl]oxy]-14,14-bis[[3-[[3-[[5-[[2-(acetylamino)-2-deoxy-b eta-D-galactopyranosyl]oxy]-1-oxopentyl]amino]propyl]amino] -3-oxopropoxy]methyl]-1,12,19,25-tetraoxo-16-oxa-13,20,24-t riazanonacos-1-yl]-4-hydroxy-2-pyrrolidinyl)methyl ester
ggtctcccaactccagaagat

SEQ ID NO: 976 - RNA, 21 nt, synthetic construct
  source 1..21: mol_type = other RNA
  modified_base 1: mod_base = OTHER; note = 2'-O-methylcytidine-3'-phosphorothioate
  modified_base 2: mod_base = OTHER; note = 2'-O-methyladenosine-3'-phosphorothioate
  modified_base 3: mod_base = OTHER; note = 2'-O-methyladenosine-3'-phosphate
  modified_base 4: mod_base = OTHER; note = 2'-O-methylcytidine-3'-phosphate
  modified_base 5: mod_base = OTHER; note = 2'-O-methyluridine-3'-phosphate
  modified_base 6: mod_base = OTHER; note = 2'-O-methylcytidine-3'-phosphate
  modified_base 7: mod_base = OTHER; note = 2'-deoxy-2'-fluorocytidine-3'-phosphate
  modified_base 8: mod_base = OTHER; note = 2'-O-methyladenosine-3'-phosphate
  modified_base 9: mod_base = OTHER; note = 2'-deoxy-2'-fluoroguanosine-3'-phosphate
  modified_base 10: mod_base = OTHER; note = 2'-deoxy-2'-fluoroadenosine-3'-phosphate
  modified_base 11: mod_base = OTHER; note = 2'-deoxy-2'-fluoroadenosine-3'-phosphate
  modified_base 12: mod_base = OTHER; note = 2'-O-methylguanosine-3'-phosphate
  modified_base 13: mod_base = OTHER; note = 2'-O-methyladenosine-3'-phosphate
  modified_base 14: mod_base = OTHER; note = 2'-O-methylcytidine-3'-phosphate
  modified_base 15: mod_base = OTHER; note = 2'-O-methyladenosine-3'-phosphate
  modified_base 16: mod_base = OTHER; note = 2'-O-methyladenosine-3'-phosphate
  modified_base 17: mod_base = OTHER; note = 2'-O-methylcytidine-3'-phosphate
  modified_base 18: mod_base = OTHER; note = 2'-O-methylcytidine-3'-phosphate
  modified_base 19: mod_base = OTHER; note = 2'-O-methyluridine-3'-phosphate
  modified_base 20: mod_base = OTHER; note = 2'-O-methyluridine-3'-phosphate
  modified_base 21: mod_base = OTHER; note = 2'-O-methyluridine-3'-phosphate ((2S,4R)-1-[29-[[2-(acetylamino)-2-deoxy-beta-D-galactopyra nosyl]oxy]-14,14-bis[[3-[[3-[[5-[[2-(acetylamino)-2-deoxy-b eta-D-galactopyranosyl]oxy]-1-oxopentyl]amino]propyl]amino] -3-oxopropoxy]methyl]-1,12,19,25-tetraoxo-16-oxa-13,20,24-t riazanonacos-1-yl]-4-hydroxy-2-pyrrolidinyl)methyl ester
caactccagaagacaaccttt

SEQ ID NO: 977 - RNA, 21 nt, synthetic construct
  source 1..21: mol_type = other RNA
  modified_base 1: mod_base = OTHER; note = 2'-O-methylguanosine-3'-phosphorothioate
  modified_base 2: mod_base = OTHER; note = 2'-O-methyladenosine-3'-phosphorothioate
  modified_base 3: mod_base = OTHER; note = 2'-O-methylcytidine-3'-phosphate
  modified_base 4: mod_base = OTHER; note = 2'-O-methyladenosine-3'-phosphate
  modified_base 5: mod_base = OTHER; note = 2'-O-methyladenosine-3'-phosphate
  modified_base 6: mod_base = OTHER; note = 2'-O-methylcytidine-3'-phosphate
  modified_base 7: mod_base = OTHER; note = 2'-deoxy-2'-fluorocytidine-3'-phosphate
  modified_base 8: mod_base = OTHER; note = 2'-O-methyluridine-3'-phosphate
  modified_base 9: mod_base = OTHER; note = 2'-deoxy-2'-fluorouridine-3'-phosphate
  modified_base 10: mod_base = OTHER; note = 2'-deoxy-2'-fluoroguanosine-3'-phosphate
  modified_base 11: mod_base = OTHER; note = 2'-deoxy-2'-fluoroadenosine-3'-phosphate
  modified_base 12: mod_base = OTHER; note = 2'-O-methylcytidine-3'-phosphate
  modified_base 13: mod_base = OTHER; note = 2'-O-methylcytidine-3'-phosphate
  modified_base 14: mod_base = OTHER; note = 2'-O-methyladenosine-3'-phosphate
  modified_base 15: mod_base = OTHER; note = 2'-O-methyluridine-3'-phosphate
  modified_base 16: mod_base = OTHER; note = 2'-O-methyluridine-3'-phosphate
  modified_base 17: mod_base = OTHER; note = 2'-O-methyladenosine-3'-phosphate
  modified_base 18: mod_base = OTHER; note = 2'-O-methylcytidine-3'-phosphate
  modified_base 19: mod_base = OTHER; note = 2'-O-methyladenosine-3'-phosphate
  modified_base 20: mod_base = OTHER; note = 2'-O-methylguanosine-3'-phosphate
  modified_base 21: mod_base = OTHER; note = 2'-O-methyluridine-3'-phosphate ((2S,4R)-1-[29-[[2-(acetylamino)-2-deoxy-beta-D-galactopyra nosyl]oxy]-14,14-bis[[3-[[3-[[5-[[2-(acetylamino)-2-deoxy-b eta-D-galactopyranosyl]oxy]-1-oxopentyl]amino]propyl]amino] -3-oxopropoxy]methyl]-1,12,19,25-tetraoxo-16-oxa-13,20,24-t riazanonacos-1-yl]-4-hydroxy-2-pyrrolidinyl)methyl ester
gacaaccttgaccattacagt

SEQ ID NO: 978 - RNA, 21 nt, synthetic construct
  source 1..21: mol_type = other RNA
  modified_base 1: mod_base = OTHER; note = 2'-O-methylcytidine-3'-phosphorothioate
  modified_base 2: mod_base = OTHER; note = 2'-O-methyluridine-3'-phosphorothioate
  modified_base 3: mod_base = OTHER; note = 2'-O-methyluridine-3'-phosphate
  modified_base 4: mod_base = OTHER; note = 2'-O-methylguanosine-3'-phosphate
  modified_base 5: mod_base = OTHER; note = 2'-O-methyladenosine-3'-phosphate
  modified_base 6: mod_base = OTHER; note = 2'-O-methylcytidine-3'-phosphate
  modified_base 7: mod_base = OTHER; note = 2'-deoxy-2'-fluorocytidine-3'-phosphate
  modified_base 8: mod_base = OTHER; note = 2'-O-methyladenosine-3'-phosphate
  modified_base 9: mod_base = OTHER; note = 2'-deoxy-2'-fluorouridine-3'-phosphate
  modified_base 10: mod_base = OTHER; note = 2'-deoxy-2'-fluorouridine-3'-phosphate
  modified_base 11: mod_base = OTHER; note = 2'-deoxy-2'-fluoroadenosine-3'-phosphate
  modified_base 12: mod_base = OTHER; note = 2'-O-methylcytidine-3'-phosphate
  modified_base 13: mod_base = OTHER; note = 2'-O-methyladenosine-3'-phosphate
  modified_base 14: mod_base = OTHER; note = 2'-O-methylguanosine-3'-phosphate
  modified_base 15: mod_base = OTHER; note = 2'-O-methyladenosine-3'-phosphate
  modified_base 16: mod_base = OTHER; note = 2'-O-methyladenosine-3'-phosphate
  modified_base 17: mod_base = OTHER; note = 2'-O-methyladenosine-3'-phosphate
  modified_base 18: mod_base = OTHER; note = 2'-O-methyluridine-3'-phosphate
  modified_base 19: mod_base = OTHER; note = 2'-O-methyluridine-3'-phosphate
  modified_base 20: mod_base = OTHER; note = 2'-O-methylcytidine-3'-phosphate
  modified_base 21: mod_base = OTHER; note = 2'-O-methyluridine-3'-phosphate ((2S,4R)-1-[29-[[2-(acetylamino)-2-deoxy-beta-D-galactopyra nosyl]oxy]-14,14-bis[[3-[[3-[[5-[[2-(acetylamino)-2-deoxy-b eta-D-galactopyranosyl]oxy]-1-oxopentyl]amino]propyl]amino] -3-oxopropoxy]methyl]-1,12,19,25-tetraoxo-16-oxa-13,20,24-t riazanonacos-1-yl]-4-hydroxy-2-pyrrolidinyl)methyl ester
cttgaccattacagaaattct

SEQ ID NO: 979 - RNA, 21 nt, synthetic construct
  source 1..21: mol_type = other RNA
  modified_base 1: mod_base = OTHER; note = 2'-O-methyladenosine-3'-phosphorothioate
  modified_base 2: mod_base = OTHER; note = 2'-O-methyluridine-3'-phosphorothioate
  modified_base 3: mod_base = OTHER; note = 2'-O-methyluridine-3'-phosphate
  modified_base 4: mod_base = OTHER; note = 2'-O-methyladenosine-3'-phosphate
  modified_base 5: mod_base = OTHER; note = 2'-O-methylcytidine-3'-phosphate
  modified_base 6: mod_base = OTHER; note = 2'-O-methyladenosine-3'-phosphate
  modified_base 7: mod_base = OTHER; note = 2'-deoxy-2'-fluoroguanosine-3'-phosphate
  modified_base 8: mod_base = OTHER; note = 2'-O-methyladenosine-3'-phosphate
  modified_base 9: mod_base = OTHER; note = 2'-deoxy-2'-fluoroadenosine-3'-phosphate
  modified_base 10: mod_base = OTHER; note = 2'-deoxy-2'-fluoroadenosine-3'-phosphate
  modified_base 11: mod_base = OTHER; note = 2'-deoxy-2'-fluorouridine-3'-phosphate
  modified_base 12: mod_base = OTHER; note = 2'-O-methyluridine-3'-phosphate
  modified_base 13: mod_base = OTHER; note = 2'-O-methylcytidine-3'-phosphate
  modified_base 14: mod_base = OTHER; note = 2'-O-methyladenosine-3'-phosphate
  modified_base 15: mod_base = OTHER; note = 2'-O-methyladenosine-3'-phosphate
  modified_base 16: mod_base = OTHER; note = 2'-O-methylcytidine-3'-phosphate
  modified_base 17: mod_base = OTHER; note = 2'-O-methyladenosine-3'-phosphate
  modified_base 18: mod_base = OTHER; note = 2'-O-methylguanosine-3'-phosphate
  modified_base 19: mod_base = OTHER; note = 2'-O-methyluridine-3'-phosphate
  modified_base 20: mod_base = OTHER; note = 2'-O-methylcytidine-3'-phosphate
  modified_base 21: mod_base = OTHER; note = 2'-O-methyluridine-3'-phosphate ((2S,4R)-1-[29-[[2-(acetylamino)-2-deoxy-beta-D-galactopyra nosyl]oxy]-14,14-bis[[3-[[3-[[5-[[2-(acetylamino)-2-deoxy-b eta-D-galactopyranosyl]oxy]-1-oxopentyl]amino]propyl]amino] -3-oxopropoxy]methyl]-1,12,19,25-tetraoxo-16-oxa-13,20,24-t riazanonacos-1-yl]-4-hydroxy-2-pyrrolidinyl)methyl ester
attacagaaattcaacagtct

SEQ ID NO: 980 - RNA, 21 nt, synthetic construct
  source 1..21: mol_type = other RNA
  modified_base 1: mod_base = OTHER; note = 2'-O-methylguanosine-3'-phosphorothioate
  modified_base 2: mod_base = OTHER; note = 2'-O-methyladenosine-3'-phosphorothioate
  modified_base 3: mod_base = OTHER; note = 2'-O-methyladenosine-3'-phosphate
  modified_base 4: mod_base = OTHER; note = 2'-O-methyladenosine-3'-phosphate
  modified_base 5: mod_base = OTHER; note = 2'-O-methyluridine-3'-phosphate
  modified_base 6: mod_base = OTHER; note = 2'-O-methyluridine-3'-phosphate
  modified_base 7: mod_base = OTHER; note = 2'-deoxy-2'-fluorocytidine-3'-phosphate
  modified_base 8: mod_base = OTHER; note = 2'-O-methyladenosine-3'-phosphate
  modified_base 9: mod_base = OTHER; note = 2'-deoxy-2'-fluoroadenosine-3'-phosphate
  modified_base 10: mod_base = OTHER; note = 2'-deoxy-2'-fluorocytidine-3'-phosphate
  modified_base 11: mod_base = OTHER; note = 2'-deoxy-2'-fluoroadenosine-3'-phosphate
  modified_base 12: mod_base = OTHER; note = 2'-O-methylguanosine-3'-phosphate
  modified_base 13: mod_base = OTHER; note = 2'-O-methyluridine-3'-phosphate
  modified_base 14: mod_base = OTHER; note = 2'-O-methylcytidine-3'-phosphate
  modified_base 15: mod_base = OTHER; note = 2'-O-methyladenosine-3'-phosphate
  modified_base 16: mod_base = OTHER; note = 2'-O-methyluridine-3'-phosphate
  modified_base 17: mod_base = OTHER; note = 2'-O-methylguanosine-3'-phosphate
  modified_base 18: mod_base = OTHER; note = 2'-O-methyladenosine-3'-phosphate
  modified_base 19: mod_base = OTHER; note = 2'-O-methylguanosine-3'-phosphate
  modified_base 20: mod_base = OTHER; note = 2'-O-methylcytidine-3'-phosphate
  modified_base 21: mod_base = OTHER; note = 2'-O-methyluridine-3'-phosphate ((2S,4R)-1-[29-[[2-(acetylamino)-2-deoxy-beta-D-galactopyra nosyl]oxy]-14,14-bis[[3-[[3-[[5-[[2-(acetylamino)-2-deoxy-b eta-D-galactopyranosyl]oxy]-1-oxopentyl]amino]propyl]amino] -3-oxopropoxy]methyl]-1,12,19,25-tetraoxo-16-oxa-13,20,24-t riazanonacos-1-yl]-4-hydroxy-2-pyrrolidinyl)methyl ester
gaaattcaacagtcatgagct

SEQ ID NO: 981 - RNA, 21 nt, synthetic construct
  source 1..21: mol_type = other RNA
  modified_base 1: mod_base = OTHER; note = 2'-O-methyluridine-3'-phosphorothioate
  modified_base 2: mod_base = OTHER; note = 2'-O-methylcytidine-3'-phosphorothioate
  modified_base 3: mod_base = OTHER; note = 2'-O-methyladenosine-3'-phosphate
  modified_base 4: mod_base = OTHER; note = 2'-O-methyluridine-3'-phosphate
  modified_base 5: mod_base = OTHER; note = 2'-O-methylguanosine-3'-phosphate
  modified_base 6: mod_base = OTHER; note = 2'-O-methyladenosine-3'-phosphate
  modified_base 7: mod_base = OTHER; note = 2'-deoxy-2'-fluoroguanosine-3'-phosphate
  modified_base 8: mod_base = OTHER; note = 2'-O-methylcytidine-3'-phosphate
  modified_base 9: mod_base = OTHER; note = 2'-deoxy-2'-fluoroadenosine-3'-phosphate
  modified_base 10: mod_base = OTHER; note = 2'-deoxy-2'-fluoroguanosine-3'-phosphate
  modified_base 11: mod_base = OTHER; note = 2'-deoxy-2'-fluoroadenosine-3'-phosphate
  modified_base 12: mod_base = OTHER; note = 2'-O-methylguanosine-3'-phosphate
  modified_base 13: mod_base = OTHER; note = 2'-O-methylcytidine-3'-phosphate
  modified_base 14: mod_base = OTHER; note = 2'-O-methyluridine-3'-phosphate
  modified_base 15: mod_base = OTHER; note = 2'-O-methylguanosine-3'-phosphate
  modified_base 16: mod_base = OTHER; note = 2'-O-methyladenosine-3'-phosphate
  modified_base 17: mod_base = OTHER; note = 2'-O-methyladenosine-3'-phosphate
  modified_base 18: mod_base = OTHER; note = 2'-O-methyladenosine-3'-phosphate
  modified_base 19: mod_base = OTHER; note = 2'-O-methyladenosine-3'-phosphate
  modified_base 20: mod_base = OTHER; note = 2'-O-methyluridine-3'-phosphate
  modified_base 21: mod_base = OTHER; note = 2'-O-methyluridine-3'-phosphate ((2S,4R)-1-[29-[[2-(acetylamino)-2-deoxy-beta-D-galactopyra nosyl]oxy]-14,14-bis[[3-[[3-[[5-[[2-(acetylamino)-2-deoxy-b eta-D-galactopyranosyl]oxy]-1-oxopentyl]amino]propyl]amino] -3-oxopropoxy]methyl]-1,12,19,25-tetraoxo-16-oxa-13,20,24-t riazanonacos-1-yl]-4-hydroxy-2-pyrrolidinyl)methyl ester
tcatgagcagagctgaaaatt

SEQ ID NO: 982 - RNA, 21 nt, synthetic construct
  source 1..21: mol_type = other RNA
  modified_base 1: mod_base = OTHER; note = 2'-O-methylguanosine-3'-phosphorothioate
  modified_base 2: mod_base = OTHER; note = 2'-O-methylcytidine-3'-phosphorothioate
  modified_base 3: mod_base = OTHER; note = 2'-O-methyladenosine-3'-phosphate
  modified_base 4: mod_base = OTHER; note = 2'-O-methylguanosine-3'-phosphate
  modified_base 5: mod_base = OTHER; note = 2'-O-methyladenosine-3'-phosphate
  modified_base 6: mod_base = OTHER; note = 2'-O-methylguanosine-3'-phosphate
  modified_base 7: mod_base = OTHER; note = 2'-deoxy-2'-fluorocytidine-3'-phosphate
  modified_base 8: mod_base = OTHER; note = 2'-O-methyluridine-3'-phosphate
  modified_base 9: mod_base = OTHER; note = 2'-deoxy-2'-fluoroguanosine-3'-phosphate
  modified_base 10: mod_base = OTHER; note = 2'-deoxy-2'-fluoroadenosine-3'-phosphate
  modified_base 11: mod_base = OTHER; note = 2'-deoxy-2'-fluoroadenosine-3'-phosphate
  modified_base 12: mod_base = OTHER; note = 2'-O-methyladenosine-3'-phosphate
  modified_base 13: mod_base = OTHER; note = 2'-O-methyladenosine-3'-phosphate
  modified_base 14: mod_base = OTHER; note = 2'-O-methyluridine-3'-phosphate
  modified_base 15: mod_base = OTHER; note = 2'-O-methyluridine-3'-phosphate
  modified_base 16: mod_base = OTHER; note = 2'-O-methyluridine-3'-phosphate
  modified_base 17: mod_base = OTHER; note = 2'-O-methyluridine-3'-phosphate
  modified_base 18: mod_base = OTHER; note = 2'-O-methyladenosine-3'-phosphate
  modified_base 19: mod_base = OTHER; note = 2'-O-methyladenosine-3'-phosphate
  modified_base 20: mod_base = OTHER; note = 2'-O-methyladenosine-3'-phosphate
  modified_base 21: mod_base = OTHER; note = 2'-O-methyluridine-3'-phosphate ((2S,4R)-1-[29-[[2-(acetylamino)-2-deoxy-beta-D-galactopyra nosyl]oxy]-14,14-bis[[3-[[3-[[5-[[2-(acetylamino)-2-deoxy-b eta-D-galactopyranosyl]oxy]-1-oxopentyl]amino]propyl]amino] -3-oxopropoxy]methyl]-1,12,19,25-tetraoxo-16-oxa-13,20,24-t riazanonacos-1-yl]-4-hydroxy-2-pyrrolidinyl)methyl ester
gcagagctgaaaattttaaat

SEQ ID NO: 983 - RNA, 21 nt, synthetic construct
  source 1..21: mol_type = other RNA
  modified_base 1: mod_base = OTHER; note = 2'-O-methyluridine-3'-phosphorothioate
  modified_base 2: mod_base = OTHER; note = 2'-O-methyluridine-3'-phosphorothioate
  modified_base 3: mod_base = OTHER; note = 2'-O-methyluridine-3'-phosphate
  modified_base 4: mod_base = OTHER; note = 2'-O-methyladenosine-3'-phosphate
  modified_base 5: mod_base = OTHER; note = 2'-O-methyladenosine-3'-phosphate
  modified_base 6: mod_base = OTHER; note = 2'-O-methyladenosine-3'-phosphate
  modified_base 7: mod_base = OTHER; note = 2'-deoxy-2'-fluorocytidine-3'-phosphate
  modified_base 8: mod_base = OTHER; note = 2'-O-methyladenosine-3'-phosphate
  modified_base 9: mod_base = OTHER; note = 2'-deoxy-2'-fluoroadenosine-3'-phosphate
  modified_base 10: mod_base = OTHER; note = 2'-deoxy-2'-fluoroguanosine-3'-phosphate
  modified_base 11: mod_base = OTHER; note = 2'-deoxy-2'-fluorouridine-3'-phosphate
  modified_base 12: mod_base = OTHER; note = 2'-O-methyluridine-3'-phosphate
  modified_base 13: mod_base = OTHER; note = 2'-O-methylguanosine-3'-phosphate
  modified_base 14: mod_base = OTHER; note = 2'-O-methyladenosine-3'-phosphate
  modified_base 15: mod_base = OTHER; note = 2'-O-methylguanosine-3'-phosphate
  modified_base 16: mod_base = OTHER; note = 2'-O-methyluridine-3'-phosphate
  modified_base 17: mod_base = OTHER; note = 2'-O-methyladenosine-3'-phosphate
  modified_base 18: mod_base = OTHER; note = 2'-O-methylcytidine-3'-phosphate
  modified_base 19: mod_base = OTHER; note = 2'-O-methylcytidine-3'-phosphate
  modified_base 20: mod_base = OTHER; note = 2'-O-methyluridine-3'-phosphate
  modified_base 21: mod_base = OTHER; note = 2'-O-methyluridine-3'-phosphate ((2S,4R)-1-[29-[[2-(acetylamino)-2-deoxy-beta-D-galactopyra nosyl]oxy]-14,14-bis[[3-[[3-[[5-[[2-(acetylamino)-2-deoxy-b eta-D-galactopyranosyl]oxy]-1-oxopentyl]amino]propyl]amino] -3-oxopropoxy]methyl]-1,12,19,25-tetraoxo-16-oxa-13,20,24-t riazanonacos-1-yl]-4-hydroxy-2-pyrrolidinyl)methyl ester
tttaaacaagttgagtacctt

SEQ ID NO: 984 - RNA, 21 nt, synthetic construct
  source 1..21: mol_type = other RNA
  modified_base 1: mod_base = OTHER; note = 2'-O-methyladenosine-3'-phosphorothioate
  modified_base 2: mod_base = OTHER; note = 2'-O-methylguanosine-3'-phosphorothioate
  modified_base 3: mod_base = OTHER; note = 2'-O-methyluridine-3'-phosphate
  modified_base 4: mod_base = OTHER; note = 2'-O-methyluridine-3'-phosphate
  modified_base 5: mod_base = OTHER; note = 2'-O-methylguanosine-3'-phosphate
  modified_base 6: mod_base = OTHER; note = 2'-O-methyladenosine-3'-phosphate
  modified_base 7: mod_base = OTHER; note = 2'-deoxy-2'-fluoroguanosine-3'-phosphate
  modified_base 8: mod_base = OTHER; note = 2'-O-methyluridine-3'-phosphate
  modified_base 9: mod_base = OTHER; note = 2'-deoxy-2'-fluoroadenosine-3'-phosphate
  modified_base 10: mod_base = OTHER; note = 2'-deoxy-2'-fluorocytidine-3'-phosphate
  modified_base 11: mod_base = OTHER; note = 2'-deoxy-2'-fluorocytidine-3'-phosphate
  modified_base 12: mod_base = OTHER; note = 2'-O-methyluridine-3'-phosphate
  modified_base 13: mod_base = OTHER; note = 2'-O-methylcytidine-3'-phosphate
  modified_base 14: mod_base = OTHER; note = 2'-O-methylcytidine-3'-phosphate
  modified_base 15: mod_base = OTHER; note = 2'-O-methyluridine-3'-phosphate
  modified_base 16: mod_base = OTHER; note = 2'-O-methyluridine-3'-phosphate
  modified_base 17: mod_base = OTHER; note = 2'-O-methyladenosine-3'-phosphate
  modified_base 18: mod_base = OTHER; note = 2'-O-methyluridine-3'-phosphate
  modified_base 19: mod_base = OTHER; note = 2'-O-methyluridine-3'-phosphate
  modified_base 20: mod_base = OTHER; note = 2'-O-methylcytidine-3'-phosphate
  modified_base 21: mod_base = OTHER; note = 2'-O-methyluridine-3'-phosphate ((2S,4R)-1-[29-[[2-(acetylamino)-2-deoxy-beta-D-galactopyra nosyl]oxy]-14,14-bis[[3-[[3-[[5-[[2-(acetylamino)-2-deoxy-b eta-D-galactopyranosyl]oxy]-1-oxopentyl]amino]propyl]amino] -3-oxopropoxy]methyl]-1,12,19,25-tetraoxo-16-oxa-13,20,24-t riazanonacos-1-yl]-4-hydroxy-2-pyrrolidinyl)methyl ester
agttgagtacctccttattct

SEQ ID NO: 985 - RNA, 21 nt, synthetic construct
  source 1..21: mol_type = other RNA
  modified_base 1: mod_base = OTHER; note = 2'-O-methyluridine-3'-phosphorothioate
  modified_base 2: mod_base = OTHER; note = 2'-O-methyladenosine-3'-phosphorothioate
  modified_base 3: mod_base = OTHER; note = 2'-O-methylcytidine-3'-phosphate
  modified_base 4: mod_base = OTHER; note = 2'-O-methylcytidine-3'-phosphate
  modified_base 5: mod_base = OTHER; note = 2'-O-methyluridine-3'-phosphate
  modified_base 6: mod_base = OTHER; note = 2'-O-methylcytidine-3'-phosphate
  modified_base 7: mod_base = OTHER; note = 2'-deoxy-2'-fluorocytidine-3'-phosphate
  modified_base 8: mod_base = OTHER; note = 2'-O-methyluridine-3'-phosphate
  modified_base 9: mod_base = OTHER; note = 2'-deoxy-2'-fluorouridine-3'-phosphate
  modified_base 10: mod_base = OTHER; note = 2'-deoxy-2'-fluoroadenosine-3'-phosphate
  modified_base 11: mod_base = OTHER; note = 2'-deoxy-2'-fluorouridine-3'-phosphate
  modified_base 12: mod_base = OTHER; note = 2'-O-methyluridine-3'-phosphate
  modified_base 13: mod_base = OTHER; note = 2'-O-methylcytidine-3'-phosphate
  modified_base 14: mod_base = OTHER; note = 2'-O-methyladenosine-3'-phosphate
  modified_base 15: mod_base = OTHER; note = 2'-O-methyluridine-3'-phosphate
  modified_base 16: mod_base = OTHER; note = 2'-O-methylguanosine-3'-phosphate
  modified_base 17: mod_base = OTHER; note = 2'-O-methylguanosine-3'-phosphate
  modified_base 18: mod_base = OTHER; note = 2'-O-methyladenosine-3'-phosphate
  modified_base 19: mod_base = OTHER; note = 2'-O-methyladenosine-3'-phosphate
  modified_base 20: mod_base = OTHER; note = 2'-O-methylcytidine-3'-phosphate
  modified_base 21: mod_base = OTHER; note = 2'-O-methyluridine-3'-phosphate ((2S,4R)-1-[29-[[2-(acetylamino)-2-deoxy-beta-D-galactopyra nosyl]oxy]-14,14-bis[[3-[[3-[[5-[[2-(acetylamino)-2-deoxy-b eta-D-galactopyranosyl]oxy]-1-oxopentyl]amino]propyl]amino] -3-oxopropoxy]methyl]-1,12,19,25-tetraoxo-16-oxa-13,20,24-t riazanonacos-1-yl]-4-hydroxy-2-pyrrolidinyl)methyl ester
tacctccttattcatggaact

SEQ ID NO: 986 - RNA, 21 nt, synthetic construct
  source 1..21: mol_type = other RNA
  modified_base 1: mod_base = OTHER; note = 2'-O-methyluridine-3'-phosphorothioate
  modified_base 2: mod_base = OTHER; note = 2'-O-methyluridine-3'-phosphorothioate
  modified_base 3: mod_base = OTHER; note = 2'-O-methyladenosine-3'-phosphate
  modified_base 4: mod_base = OTHER; note = 2'-O-methyluridine-3'-phosphate
  modified_base 5: mod_base = OTHER; note = 2'-O-methyluridine-3'-phosphate
  modified_base 6: mod_base = OTHER; note = 2'-O-methylcytidine-3'-phosphate
  modified_base 7: mod_base = OTHER; note = 2'-deoxy-2'-fluoroadenosine-3'-phosphate
  modified_base 8: mod_base = OTHER; note = 2'-O-methyluridine-3'-phosphate
  modified_base 9: mod_base = OTHER; note = 2'-deoxy-2'-fluoroguanosine-3'-phosphate
  modified_base 10: mod_base = OTHER; note = 2'-deoxy-2'-fluoroguanosine-3'-phosphate
  modified_base 11: mod_base = OTHER; note = 2'-deoxy-2'-fluoroadenosine-3'-phosphate
  modified_base 12: mod_base = OTHER; note = 2'-O-methyladenosine-3'-phosphate
  modified_base 13: mod_base = OTHER; note = 2'-O-methylcytidine-3'-phosphate
  modified_base 14: mod_base = OTHER; note = 2'-O-methyladenosine-3'-phosphate
  modified_base 15: mod_base = OTHER; note = 2'-O-methylguanosine-3'-phosphate
  modified_base 16: mod_base = OTHER; note = 2'-O-methylcytidine-3'-phosphate
  modified_base 17: mod_base = OTHER; note = 2'-O-methyladenosine-3'-phosphate
  modified_base 18: mod_base = OTHER; note = 2'-O-methylguanosine-3'-phosphate
  modified_base 19: mod_base = OTHER; note = 2'-O-methyladenosine-3'-phosphate
  modified_base 20: mod_base = OTHER; note = 2'-O-methyluridine-3'-phosphate
  modified_base 21: mod_base = OTHER; note = 2'-O-methyluridine-3'-phosphate ((2S,4R)-1-[29-[[2-(acetylamino)-2-deoxy-beta-D-galactopyra nosyl]oxy]-14,14-bis[[3-[[3-[[5-[[2-(acetylamino)-2-deoxy-b eta-D-galactopyranosyl]oxy]-1-oxopentyl]amino]propyl]amino] -3-oxopropoxy]methyl]-1,12,19,25-tetraoxo-16-oxa-13,20,24-t riazanonacos-1-yl]-4-hydroxy-2-pyrrolidinyl)methyl ester
ttattcatggaacagcagatt

SEQ ID NO: 987 - RNA, 21 nt, synthetic construct
  source 1..21: mol_type = other RNA
  modified_base 1: mod_base = OTHER; note = 2'-O-methylguanosine-3'-phosphorothioate
  modified_base 2: mod_base = OTHER; note = 2'-O-methyladenosine-3'-phosphorothioate
  modified_base 3: mod_base = OTHER; note = 2'-O-methyladenosine-3'-phosphate
  modified_base 4: mod_base = OTHER; note = 2'-O-methylcytidine-3'-phosphate
  modified_base 5: mod_base = OTHER; note = 2'-O-methyladenosine-3'-phosphate
  modified_base 6: mod_base = OTHER; note = 2'-O-methylguanosine-3'-phosphate
  modified_base 7: mod_base = OTHER; note = 2'-deoxy-2'-fluorocytidine-3'-phosphate
  modified_base 8: mod_base = OTHER; note = 2'-O-methyladenosine-3'-phosphate
  modified_base 9: mod_base = OTHER; note = 2'-deoxy-2'-fluoroguanosine-3'-phosphate
  modified_base 10: mod_base = OTHER; note = 2'-deoxy-2'-fluoroadenosine-3'-phosphate
  modified_base 11: mod_base = OTHER; note = 2'-deoxy-2'-fluorouridine-3'-phosphate
  modified_base 12: mod_base = OTHER; note = 2'-O-methylguanosine-3'-phosphate
  modified_base 13: mod_base = OTHER; note = 2'-O-methyladenosine-3'-phosphate
  modified_base 14: mod_base = OTHER; note = 2'-O-methyluridine-3'-phosphate
  modified_base 15: mod_base = OTHER; note = 2'-O-methyladenosine-3'-phosphate
  modified_base 16: mod_base = OTHER; note = 2'-O-methyladenosine-3'-phosphate
  modified_base 17: mod_base = OTHER; note = 2'-O-methylcytidine-3'-phosphate
  modified_base 18: mod_base = OTHER; note = 2'-O-methylguanosine-3'-phosphate
  modified_base 19: mod_base = OTHER; note = 2'-O-methyluridine-3'-phosphate
  modified_base 20: mod_base = OTHER; note = 2'-O-methyluridine-3'-phosphate
  modified_base 21: mod_base = OTHER; note = 2'-O-methyluridine-3'-phosphate ((2S,4R)-1-[29-[[2-(acetylamino)-2-deoxy-beta-D-galactopyra nosyl]oxy]-14,14-bis[[3-[[3-[[5-[[2-(acetylamino)-2-deoxy-b eta-D-galactopyranosyl]oxy]-1-oxopentyl]amino]propyl]amino] -3-oxopropoxy]methyl]-1,12,19,25-tetraoxo-16-oxa-13,20,24-t riazanonacos-1-yl]-4-hydroxy-2-pyrrolidinyl)methyl ester
gaacagcagatgataacgttt

SEQ ID NO: 988 - RNA, 21 nt, synthetic construct
  source 1..21: mol_type = other RNA
  modified_base 1: mod_base = OTHER; note = 2'-O-methylcytidine-3'-phosphorothioate
  modified_base 2: mod_base = OTHER; note = 2'-O-methyladenosine-3'-phosphorothioate
  modified_base 3: mod_base = OTHER; note = 2'-O-methylguanosine-3'-phosphate
  modified_base 4: mod_base = OTHER; note = 2'-O-methyladenosine-3'-phosphate
  modified_base 5: mod_base = OTHER; note = 2'-O-methyluridine-3'-phosphate
  modified_base 6: mod_base = OTHER; note = 2'-O-methylguanosine-3'-phosphate
  modified_base 7: mod_base = OTHER; note = 2'-deoxy-2'-fluoroadenosine-3'-phosphate
  modified_base 8: mod_base = OTHER; note = 2'-O-methyluridine-3'-phosphate
  modified_base 9: mod_base = OTHER; note = 2'-deoxy-2'-fluoroadenosine-3'-phosphate
  modified_base 10: mod_base = OTHER; note = 2'-deoxy-2'-fluoroadenosine-3'-phosphate
  modified_base 11: mod_base = OTHER; note = 2'-deoxy-2'-fluorocytidine-3'-phosphate
  modified_base 12: mod_base = OTHER; note = 2'-O-methylguanosine-3'-phosphate
  modified_base 13: mod_base = OTHER; note = 2'-O-methyluridine-3'-phosphate
  modified_base 14: mod_base = OTHER; note = 2'-O-methyluridine-3'-phosphate
  modified_base 15: mod_base = OTHER; note = 2'-O-methylcytidine-3'-phosphate
  modified_base 16: mod_base = OTHER; note = 2'-O-methyladenosine-3'-phosphate
  modified_base 17: mod_base = OTHER; note = 2'-O-methylcytidine-3'-phosphate
  modified_base 18: mod_base = OTHER; note = 2'-O-methyluridine-3'-phosphate
  modified_base 19: mod_base = OTHER; note = 2'-O-methyluridine-3'-phosphate
  modified_base 20: mod_base = OTHER; note = 2'-O-methyluridine-3'-phosphate
  modified_base 21: mod_base = OTHER; note = 2'-O-methyluridine-3'-phosphate ((2S,4R)-1-[29-[[2-(acetylamino)-2-deoxy-beta-D-galactopyra nosyl]oxy]-14,14-bis[[3-[[3-[[5-[[2-(acetylamino)-2-deoxy-b eta-D-galactopyranosyl]oxy]-1-oxopentyl]amino]propyl]amino] -3-oxopropoxy]methyl]-1,12,19,25-tetraoxo-16-oxa-13,20,24-t riazanonacos-1-yl]-4-hydroxy-2-pyrrolidinyl)methyl ester
cagatgataacgttcactttt

SEQ ID NO: 989 - RNA, 21 nt, synthetic construct
  source 1..21: mol_type = other RNA
  modified_base 1: mod_base = OTHER; note = 2'-O-methyluridine-3'-phosphorothioate
  modified_base 2: mod_base = OTHER; note = 2'-O-methyladenosine-3'-phosphorothioate
  modified_base 3: mod_base = OTHER; note = 2'-O-methyladenosine-3'-phosphate
  modified_base 4: mod_base = OTHER; note = 2'-O-methylcytidine-3'-phosphate
  modified_base 5: mod_base = OTHER; note = 2'-O-methylguanosine-3'-phosphate
  modified_base 6: mod_base = OTHER; note = 2'-O-methyluridine-3'-phosphate
  modified_base 7: mod_base = OTHER; note = 2'-deoxy-2'-fluorouridine-3'-phosphate
  modified_base 8: mod_base = OTHER; note = 2'-O-methylcytidine-3'-phosphate
  modified_base 9: mod_base = OTHER; note = 2'-deoxy-2'-fluoroadenosine-3'-phosphate
  modified_base 10: mod_base = OTHER; note = 2'-deoxy-2'-fluorocytidine-3'-phosphate
  modified_base 11: mod_base = OTHER; note = 2'-deoxy-2'-fluorouridine-3'-phosphate
  modified_base 12: mod_base = OTHER; note = 2'-O-methyluridine-3'-phosphate
  modified_base 13: mod_base = OTHER; note = 2'-O-methyluridine-3'-phosphate
  modified_base 14: mod_base = OTHER; note = 2'-O-methylcytidine-3'-phosphate
  modified_base 15: mod_base = OTHER; note = 2'-O-methyladenosine-3'-phosphate
  modified_base 16: mod_base = OTHER; note = 2'-O-methylguanosine-3'-phosphate
  modified_base 17: mod_base = OTHER; note = 2'-O-methylcytidine-3'-phosphate
  modified_base 18: mod_base = OTHER; note = 2'-O-methyladenosine-3'-phosphate
  modified_base 19: mod_base = OTHER; note = 2'-O-methylguanosine-3'-phosphate
  modified_base 20: mod_base = OTHER; note = 2'-O-methyluridine-3'-phosphate
  modified_base 21: mod_base = OTHER; note = 2'-O-methyluridine-3'-phosphate ((2S,4R)-1-[29-[[2-(acetylamino)-2-deoxy-beta-D-galactopyra nosyl]oxy]-14,14-bis[[3-[[3-[[5-[[2-(acetylamino)-2-deoxy-b eta-D-galactopyranosyl]oxy]-1-oxopentyl]amino]propyl]amino] -3-oxopropoxy]methyl]-1,12,19,25-tetraoxo-16-oxa-13,20,24-t riazanonacos-1-yl]-4-hydroxy-2-pyrrolidinyl)methyl ester
taacgttcactttcagcagtt

SEQ ID NO: 990 - RNA, 21 nt, synthetic construct
  source 1..21: mol_type = other RNA
  modified_base 1: mod_base = OTHER; note = 2'-O-methyluridine-3'-phosphorothioate
  modified_base 2: mod_base = OTHER; note = 2'-O-methylcytidine-3'-phosphorothioate
  modified_base 3: mod_base = OTHER; note = 2'-O-methyladenosine-3'-phosphate
  modified_base 4: mod_base = OTHER; note = 2'-O-methylcytidine-3'-phosphate
  modified_base 5: mod_base = OTHER; note = 2'-O-methyluridine-3'-phosphate
  modified_base 6: mod_base = OTHER; note = 2'-O-methyluridine-3'-phosphate
  modified_base 7: mod_base = OTHER; note = 2'-deoxy-2'-fluorouridine-3'-phosphate
  modified_base 8: mod_base = OTHER; note = 2'-O-methylcytidine-3'-phosphate
  modified_base 9: mod_base = OTHER; note = 2'-deoxy-2'-fluoroadenosine-3'-phosphate
  modified_base 10: mod_base = OTHER; note = 2'-deoxy-2'-fluoroguanosine-3'-phosphate
  modified_base 11: mod_base = OTHER; note = 2'-deoxy-2'-fluorocytidine-3'-phosphate
  modified_base 12: mod_base = OTHER; note = 2'-O-methyladenosine-3'-phosphate
  modified_base 13: mod_base = OTHER; note = 2'-O-methylguanosine-3'-phosphate
  modified_base 14: mod_base = OTHER; note = 2'-O-methyluridine-3'-phosphate
  modified_base 15: mod_base = OTHER; note = 2'-O-methylcytidine-3'-phosphate
  modified_base 16: mod_base = OTHER; note = 2'-O-methyladenosine-3'-phosphate
  modified_base 17: mod_base = OTHER; note = 2'-O-methylguanosine-3'-phosphate
  modified_base 18: mod_base = OTHER; note = 2'-O-methylcytidine-3'-phosphate
  modified_base 19: mod_base = OTHER; note = 2'-O-methyluridine-3'-phosphate
  modified_base 20: mod_base = OTHER; note = 2'-O-methylcytidine-3'-phosphate
  modified_base 21: mod_base = OTHER; note = 2'-O-methyluridine-3'-phosphate ((2S,4R)-1-[29-[[2-(acetylamino)-2-deoxy-beta-D-galactopyra nosyl]oxy]-14,14-bis[[3-[[3-[[5-[[2-(acetylamino)-2-deoxy-b eta-D-galactopyranosyl]oxy]-1-oxopentyl]amino]propyl]amino] -3-oxopropoxy]methyl]-1,12,19,25-tetraoxo-16-oxa-13,20,24-t riazanonacos-1-yl]-4-hydroxy-2-pyrrolidinyl)methyl ester
tcactttcagcagtcagctct

SEQ ID NO: 991 - RNA, 21 nt, synthetic construct
  source 1..21: mol_type = other RNA
  modified_base 1: mod_base = OTHER; note = 2'-O-methylguanosine-3'-phosphorothioate
  modified_base 2: mod_base = OTHER; note = 2'-O-methylcytidine-3'-phosphorothioate
  modified_base 3: mod_base = OTHER; note = 2'-O-methyladenosine-3'-phosphate
  modified_base 4: mod_base = OTHER; note = 2'-O-methylguanosine-3'-phosphate
  modified_base 5: mod_base = OTHER; note = 2'-O-methyluridine-3'-phosphate
  modified_base 6: mod_base = OTHER; note = 2'-O-methylcytidine-3'-phosphate
  modified_base 7: mod_base = OTHER; note = 2'-deoxy-2'-fluoroadenosine-3'-phosphate
  modified_base 8: mod_base = OTHER; note = 2'-O-methylguanosine-3'-phosphate
  modified_base 9: mod_base = OTHER; note = 2'-deoxy-2'-fluorocytidine-3'-phosphate
  modified_base 10: mod_base = OTHER; note = 2'-deoxy-2'-fluorouridine-3'-phosphate
  modified_base 11: mod_base = OTHER; note = 2'-deoxy-2'-fluorocytidine-3'-phosphate
  modified_base 12: mod_base = OTHER; note = 2'-O-methyladenosine-3'-phosphate
  modified_base 13: mod_base = OTHER; note = 2'-O-methylguanosine-3'-phosphate
  modified_base 14: mod_base = OTHER; note = 2'-O-methyladenosine-3'-phosphate
  modified_base 15: mod_base = OTHER; note = 2'-O-methyluridine-3'-phosphate
  modified_base 16: mod_base = OTHER; note = 2'-O-methylcytidine-3'-phosphate
  modified_base 17: mod_base = OTHER; note = 2'-O-methyluridine-3'-phosphate
  modified_base 18: mod_base = OTHER; note = 2'-O-methylcytidine-3'-phosphate
  modified_base 19: mod_base = OTHER; note = 2'-O-methylcytidine-3'-phosphate
  modified_base 20: mod_base = OTHER; note = 2'-O-methyladenosine-3'-phosphate
  modified_base 21: mod_base = OTHER; note = 2'-O-methyluridine-3'-phosphate ((2S,4R)-1-[29-[[2-(acetylamino)-2-deoxy-beta-D-galactopyra nosyl]oxy]-14,14-bis[[3-[[3-[[5-[[2-(acetylamino)-2-deoxy-b eta-D-galactopyranosyl]oxy]-1-oxopentyl]amino]propyl]amino] -3-oxopropoxy]methyl]-1,12,19,25-tetraoxo-16-oxa-13,20,24-t riazanonacos-1-yl]-4-hydroxy-2-pyrrolidinyl)methyl ester
gcagtcagctcagatctccat

SEQ ID NO: 992 - RNA, 21 nt, synthetic construct
  source 1..21: mol_type = other RNA
  modified_base 1: mod_base = OTHER; note = 2'-O-methylguanosine-3'-phosphorothioate
  modified_base 2: mod_base = OTHER; note = 2'-O-methylcytidine-3'-phosphorothioate
  modified_base 3: mod_base = OTHER; note = 2'-O-methyluridine-3'-phosphate
  modified_base 4: mod_base = OTHER; note = 2'-O-methylcytidine-3'-phosphate
  modified_base 5: mod_base = OTHER; note = 2'-O-methyladenosine-3'-phosphate
  modified_base 6: mod_base = OTHER; note = 2'-O-methylguanosine-3'-phosphate
  modified_base 7: mod_base = OTHER; note = 2'-deoxy-2'-fluoroadenosine-3'-phosphate
  modified_base 8: mod_base = OTHER; note = 2'-O-methyluridine-3'-phosphate
  modified_base 9: mod_base = OTHER; note = 2'-deoxy-2'-fluorocytidine-3'-phosphate
  modified_base 10: mod_base = OTHER; note = 2'-deoxy-2'-fluorouridine-3'-phosphate
  modified_base 11: mod_base = OTHER; note = 2'-deoxy-2'-fluorocytidine-3'-phosphate
  modified_base 12: mod_base = OTHER; note = 2'-O-methylcytidine-3'-phosphate
  modified_base 13: mod_base = OTHER; note = 2'-O-methyladenosine-3'-phosphate
  modified_base 14: mod_base = OTHER; note = 2'-O-methyladenosine-3'-phosphate
  modified_base 15: mod_base = OTHER; note = 2'-O-methyladenosine-3'-phosphate
  modified_base 16: mod_base = OTHER; note = 2'-O-methylguanosine-3'-phosphate
  modified_base 17: mod_base = OTHER; note = 2'-O-methylcytidine-3'-phosphate
  modified_base 18: mod_base = OTHER; note = 2'-O-methylcytidine-3'-phosphate
  modified_base 19: mod_base = OTHER; note = 2'-O-methylcytidine-3'-phosphate
  modified_base 20: mod_base = OTHER; note = 2'-O-methyluridine-3'-phosphate
  modified_base 21: mod_base = OTHER; note = 2'-O-methyluridine-3'-phosphate ((2S,4R)-1-[29-[[2-(acetylamino)-2-deoxy-beta-D-galactopyra nosyl]oxy]-14,14-bis[[3-[[3-[[5-[[2-(acetylamino)-2-deoxy-b eta-D-galactopyranosyl]oxy]-1-oxopentyl]amino]propyl]amino] -3-oxopropoxy]methyl]-1,12,19,25-tetraoxo-16-oxa-13,20,24-t riazanonacos-1-yl]-4-hydroxy-2-pyrrolidinyl)methyl ester
gctcagatctccaaagccctt

SEQ ID NO: 993 - RNA, 21 nt, synthetic construct
  source 1..21: mol_type = other RNA
  modified_base 1: mod_base = OTHER; note = 2'-O-methyluridine-3'-phosphorothioate
  modified_base 2: mod_base = OTHER; note = 2'-O-methylcytidine-3'-phosphorothioate
  modified_base 3: mod_base = OTHER; note = 2'-O-methyluridine-3'-phosphate
  modified_base 4: mod_base = OTHER; note = 2'-O-methylcytidine-3'-phosphate
  modified_base 5: mod_base = OTHER; note = 2'-O-methylcytidine-3'-phosphate
  modified_base 6: mod_base = OTHER; note = 2'-O-methyladenosine-3'-phosphate
  modified_base 7: mod_base = OTHER; note = 2'-deoxy-2'-fluoroadenosine-3'-phosphate
  modified_base 8: mod_base = OTHER; note = 2'-O-methyladenosine-3'-phosphate
  modified_base 9: mod_base = OTHER; note = 2'-deoxy-2'-fluoroguanosine-3'-phosphate
  modified_base 10: mod_base = OTHER; note = 2'-deoxy-2'-fluorocytidine-3'-phosphate
  modified_base 11: mod_base = OTHER; note = 2'-deoxy-2'-fluorocytidine-3'-phosphate
  modified_base 12: mod_base = OTHER; note = 2'-O-methylcytidine-3'-phosphate
  modified_base 13: mod_base = OTHER; note = 2'-O-methyluridine-3'-phosphate
  modified_base 14: mod_base = OTHER; note = 2'-O-methylguanosine-3'-phosphate
  modified_base 15: mod_base = OTHER; note = 2'-O-methylguanosine-3'-phosphate
  modified_base 16: mod_base = OTHER; note = 2'-O-methyluridine-3'-phosphate
  modified_base 17: mod_base = OTHER; note = 2'-O-methylcytidine-3'-phosphate
  modified_base 18: mod_base = OTHER; note = 2'-O-methylguanosine-3'-phosphate
  modified_base 19: mod_base = OTHER; note = 2'-O-methyladenosine-3'-phosphate
  modified_base 20: mod_base = OTHER; note = 2'-O-methyluridine-3'-phosphate
  modified_base 21: mod_base = OTHER; note = 2'-O-methyluridine-3'-phosphate ((2S,4R)-1-[29-[[2-(acetylamino)-2-deoxy-beta-D-galactopyra nosyl]oxy]-14,14-bis[[3-[[3-[[5-[[2-(acetylamino)-2-deoxy-b eta-D-galactopyranosyl]oxy]-1-oxopentyl]amino]propyl]amino] -3-oxopropoxy]methyl]-1,12,19,25-tetraoxo-16-oxa-13,20,24-t riazanonacos-1-yl]-4-hydroxy-2-pyrrolidinyl)methyl ester
tctccaaagccctggtcgatt

SEQ ID NO: 994 - RNA, 21 nt, synthetic construct
  source 1..21: mol_type = other RNA
  modified_base 1: mod_base = OTHER; note = 2'-O-methylguanosine-3'-phosphorothioate
  modified_base 2: mod_base = OTHER; note = 2'-O-methylcytidine-3'-phosphorothioate
  modified_base 3: mod_base = OTHER; note = 2'-O-methylcytidine-3'-phosphate
  modified_base 4: mod_base = OTHER; note = 2'-O-methylcytidine-3'-phosphate
  modified_base 5: mod_base = OTHER; note = 2'-O-methyluridine-3'-phosphate
  modified_base 6: mod_base = OTHER; note = 2'-O-methylguanosine-3'-phosphate
  modified_base 7: mod_base = OTHER; note = 2'-deoxy-2'-fluoroguanosine-3'-phosphate
  modified_base 8: mod_base = OTHER; note = 2'-O-methyluridine-3'-phosphate
  modified_base 9: mod_base = OTHER; note = 2'-deoxy-2'-fluorocytidine-3'-phosphate
  modified_base 10: mod_base = OTHER; note = 2'-deoxy-2'-fluoroguanosine-3'-phosphate
  modified_base 11: mod_base = OTHER; note = 2'-deoxy-2'-fluoroadenosine-3'-phosphate
  modified_base 12: mod_base = OTHER; note = 2'-O-methyluridine-3'-phosphate
  modified_base 13: mod_base = OTHER; note = 2'-O-methylguanosine-3'-phosphate
  modified_base 14: mod_base = OTHER; note = 2'-O-methyluridine-3'-phosphate
  modified_base 15: mod_base = OTHER; note = 2'-O-methyluridine-3'-phosphate
  modified_base 16: mod_base = OTHER; note = 2'-O-methylguanosine-3'-phosphate
  modified_base 17: mod_base = OTHER; note = 2'-O-methylguanosine-3'-phosphate
  modified_base 18: mod_base = OTHER; note = 2'-O-methyladenosine-3'-phosphate
  modified_base 19: mod_base = OTHER; note = 2'-O-methylguanosine-3'-phosphate
  modified_base 20: mod_base = OTHER; note = 2'-O-methyluridine-3'-phosphate
  modified_base 21: mod_base = OTHER; note = 2'-O-methyluridine-3'-phosphate ((2S,4R)-1-[29-[[2-(acetylamino)-2-deoxy-beta-D-galactopyra nosyl]oxy]-14,14-bis[[3-[[3-[[5-[[2-(acetylamino)-2-deoxy-b eta-D-galactopyranosyl]oxy]-1-oxopentyl]amino]propyl]amino] -3-oxopropoxy]methyl]-1,12,19,25-tetraoxo-16-oxa-13,20,24-t riazanonacos-1-yl]-4-hydroxy-2-pyrrolidinyl)methyl ester
gccctggtcgatgttggagtt

SEQ ID NO: 995 - RNA, 21 nt, synthetic construct
  source 1..21: mol_type = other RNA
  modified_base 1: mod_base = OTHER; note = 2'-O-methylguanosine-3'-phosphorothioate
  modified_base 2: mod_base = OTHER; note = 2'-O-methyluridine-3'-phosphorothioate
  modified_base 3: mod_base = OTHER; note = 2'-O-methylcytidine-3'-phosphate
  modified_base 4: mod_base = OTHER; note = 2'-O-methylguanosine-3'-phosphate
  modified_base 5: mod_base = OTHER; note = 2'-O-methyladenosine-3'-phosphate
  modified_base 6: mod_base = OTHER; note = 2'-O-methyluridine-3'-phosphate
  modified_base 7: mod_base = OTHER; note = 2'-deoxy-2'-fluoroguanosine-3'-phosphate
  modified_base 8: mod_base = OTHER; note = 2'-O-methyluridine-3'-phosphate
  modified_base 9: mod_base = OTHER; note = 2'-deoxy-2'-fluorouridine-3'-phosphate
  modified_base 10: mod_base = OTHER; note = 2'-deoxy-2'-fluoroguanosine-3'-phosphate
  modified_base 11: mod_base = OTHER; note = 2'-deoxy-2'-fluoroguanosine-3'-phosphate
  modified_base 12: mod_base = OTHER; note = 2'-O-methyladenosine-3'-phosphate
  modified_base 13: mod_base = OTHER; note = 2'-O-methylguanosine-3'-phosphate
  modified_base 14: mod_base = OTHER; note = 2'-O-methyluridine-3'-phosphate
  modified_base 15: mod_base = OTHER; note = 2'-O-methylguanosine-3'-phosphate
  modified_base 16: mod_base = OTHER; note = 2'-O-methylguanosine-3'-phosphate
  modified_base 17: mod_base = OTHER; note = 2'-O-methyladenosine-3'-phosphate
  modified_base 18: mod_base = OTHER; note = 2'-O-methyluridine-3'-phosphate
  modified_base 19: mod_base = OTHER; note = 2'-O-methyluridine-3'-phosphate
  modified_base 20: mod_base = OTHER; note = 2'-O-methyluridine-3'-phosphate
  modified_base 21: mod_base = OTHER; note = 2'-O-methyluridine-3'-phosphate ((2S,4R)-1-[29-[[2-(acetylamino)-2-deoxy-beta-D-galactopyra nosyl]oxy]-14,14-bis[[3-[[3-[[5-[[2-(acetylamino)-2-deoxy-b eta-D-galactopyranosyl]oxy]-1-oxopentyl]amino]propyl]amino] -3-oxopropoxy]methyl]-1,12,19,25-tetraoxo-16-oxa-13,20,24-t riazanonacos-1-yl]-4-hydroxy-2-pyrrolidinyl)methyl ester
gtcgatgttggagtggatttt

SEQ ID NO: 996 - RNA, 21 nt, synthetic construct
  source 1..21: mol_type = other RNA
  modified_base 1: mod_base = OTHER; note = 2'-O-methyladenosine-3'-phosphorothioate
  modified_base 2: mod_base = OTHER; note = 2'-O-methylguanosine-3'-phosphorothioate
  modified_base 3: mod_base = OTHER; note = 2'-O-methyluridine-3'-phosphate
  modified_base 4: mod_base = OTHER; note = 2'-O-methylguanosine-3'-phosphate
  modified_base 5: mod_base = OTHER; note = 2'-O-methylguanosine-3'-phosphate
  modified_base 6: mod_base = OTHER; note = 2'-O-methyladenosine-3'-phosphate
  modified_base 7: mod_base = OTHER; note = 2'-deoxy-2'-fluorouridine-3'-phosphate
  modified_base 8: mod_base = OTHER; note = 2'-O-methyluridine-3'-phosphate
  modified_base 9: mod_base = OTHER; note = 2'-deoxy-2'-fluorouridine-3'-phosphate
  modified_base 10: mod_base = OTHER; note = 2'-deoxy-2'-fluorocytidine-3'-phosphate
  modified_base 11: mod_base = OTHER; note = 2'-deoxy-2'-fluorocytidine-3'-phosphate
  modified_base 12: mod_base = OTHER; note = 2'-O-methyladenosine-3'-phosphate
  modified_base 13: mod_base = OTHER; note = 2'-O-methylguanosine-3'-phosphate
  modified_base 14: mod_base = OTHER; note = 2'-O-methylguanosine-3'-phosphate
  modified_base 15: mod_base = OTHER; note = 2'-O-methylcytidine-3'-phosphate
  modified_base 16: mod_base = OTHER; note = 2'-O-methyladenosine-3'-phosphate
  modified_base 17: mod_base = OTHER; note = 2'-O-methyladenosine-3'-phosphate
  modified_base 18: mod_base = OTHER; note = 2'-O-methyluridine-3'-phosphate
  modified_base 19: mod_base = OTHER; note = 2'-O-methylguanosine-3'-phosphate
  modified_base 20: mod_base = OTHER; note = 2'-O-methyluridine-3'-phosphate
  modified_base 21: mod_base = OTHER; note = 2'-O-methyluridine-3'-phosphate ((2S,4R)-1-[29-[[2-(acetylamino)-2-deoxy-beta-D-galactopyra nosyl]oxy]-14,14-bis[[3-[[3-[[5-[[2-(acetylamino)-2-deoxy-b eta-D-galactopyranosyl]oxy]-1-oxopentyl]amino]propyl]amino] -3-oxopropoxy]methyl]-1,12,19,25-tetraoxo-16-oxa-13,20,24-t riazanonacos-1-yl]-4-hydroxy-2-pyrrolidinyl)methyl ester
agtggatttccaggcaatgtt

SEQ ID NO: 997 - RNA, 21 nt, synthetic construct
  source 1..21: mol_type = other RNA
  modified_base 1: mod_base = OTHER; note = 2'-O-methyluridine-3'-phosphorothioate
  modified_base 2: mod_base = OTHER; note = 2'-O-methylcytidine-3'-phosphorothioate
  modified_base 3: mod_base = OTHER; note = 2'-O-methylcytidine-3'-phosphate
  modified_base 4: mod_base = OTHER; note = 2'-O-methyladenosine-3'-phosphate
  modified_base 5: mod_base = OTHER; note = 2'-O-methylguanosine-3'-phosphate
  modified_base 6: mod_base = OTHER; note = 2'-O-methylguanosine-3'-phosphate
  modified_base 7: mod_base = OTHER; note = 2'-deoxy-2'-fluorocytidine-3'-phosphate
  modified_base 8: mod_base = OTHER; note = 2'-O-methyladenosine-3'-phosphate
  modified_base 9: mod_base = OTHER; note = 2'-deoxy-2'-fluoroadenosine-3'-phosphate
  modified_base 10: mod_base = OTHER; note = 2'-deoxy-2'-fluorouridine-3'-phosphate
  modified_base 11: mod_base = OTHER; note = 2'-deoxy-2'-fluoroguanosine-3'-phosphate
  modified_base 12: mod_base = OTHER; note = 2'-O-methyluridine-3'-phosphate
  modified_base 13: mod_base = OTHER; note = 2'-O-methylguanosine-3'-phosphate
  modified_base 14: mod_base = OTHER; note = 2'-O-methylguanosine-3'-phosphate
  modified_base 15: mod_base = OTHER; note = 2'-O-methyluridine-3'-phosphate
  modified_base 16: mod_base = OTHER; note = 2'-O-methyladenosine-3'-phosphate
  modified_base 17: mod_base = OTHER; note = 2'-O-methyluridine-3'-phosphate
  modified_base 18: mod_base = OTHER; note = 2'-O-methyladenosine-3'-phosphate
  modified_base 19: mod_base = OTHER; note = 2'-O-methylcytidine-3'-phosphate
  modified_base 20: mod_base = OTHER; note = 2'-O-methyluridine-3'-phosphate
  modified_base 21: mod_base = OTHER; note = 2'-O-methyluridine-3'-phosphate ((2S,4R)-1-[29-[[2-(acetylamino)-2-deoxy-beta-D-galactopyra nosyl]oxy]-14,14-bis[[3-[[3-[[5-[[2-(acetylamino)-2-deoxy-b eta-D-galactopyranosyl]oxy]-1-oxopentyl]amino]propyl]amino] -3-oxopropoxy]methyl]-1,12,19,25-tetraoxo-16-oxa-13,20,24-t riazanonacos-1-yl]-4-hydroxy-2-pyrrolidinyl)methyl ester
tccaggcaatgtggtatactt

SEQ ID NO: 998 - RNA, 21 nt, synthetic construct
  source 1..21: mol_type = other RNA
  modified_base 1: mod_base = OTHER; note = 2'-O-methyladenosine-3'-phosphorothioate
  modified_base 2: mod_base = OTHER; note = 2'-O-methyladenosine-3'-phosphorothioate
  modified_base 3: mod_base = OTHER; note = 2'-O-methyluridine-3'-phosphate
  modified_base 4: mod_base = OTHER; note = 2'-O-methylguanosine-3'-phosphate
  modified_base 5: mod_base = OTHER; note = 2'-O-methyluridine-3'-phosphate
  modified_base 6: mod_base = OTHER; note = 2'-O-methylguanosine-3'-phosphate
  modified_base 7: mod_base = OTHER; note = 2'-deoxy-2'-fluoroguanosine-3'-phosphate
  modified_base 8: mod_base = OTHER; note = 2'-O-methyluridine-3'-phosphate
  modified_base 9: mod_base = OTHER; note = 2'-deoxy-2'-fluoroadenosine-3'-phosphate
  modified_base 10: mod_base = OTHER; note = 2'-deoxy-2'-fluorouridine-3'-phosphate
  modified_base 11: mod_base = OTHER; note = 2'-deoxy-2'-fluoroadenosine-3'-phosphate
  modified_base 12: mod_base = OTHER; note = 2'-O-methylcytidine-3'-phosphate
  modified_base 13: mod_base = OTHER; note = 2'-O-methyluridine-3'-phosphate
  modified_base 14: mod_base = OTHER; note = 2'-O-methylguanosine-3'-phosphate
  modified_base 15: mod_base = OTHER; note = 2'-O-methyladenosine-3'-phosphate
  modified_base 16: mod_base = OTHER; note = 2'-O-methyluridine-3'-phosphate
  modified_base 17: mod_base = OTHER; note = 2'-O-methylguanosine-3'-phosphate
  modified_base 18: mod_base = OTHER; note = 2'-O-methyladenosine-3'-phosphate
  modified_base 19: mod_base = OTHER; note = 2'-O-methyladenosine-3'-phosphate
  modified_base 20: mod_base = OTHER; note = 2'-O-methylguanosine-3'-phosphate
  modified_base 21: mod_base = OTHER; note = 2'-O-methyluridine-3'-phosphate ((2S,4R)-1-[29-[[2-(acetylamino)-2-deoxy-beta-D-galactopyra nosyl]oxy]-14,14-bis[[3-[[3-[[5-[[2-(acetylamino)-2-deoxy-b eta-D-galactopyranosyl]oxy]-1-oxopentyl]amino]propyl]amino] -3-oxopropoxy]methyl]-1,12,19,25-tetraoxo-16-oxa-13,20,24-t riazanonacos-1-yl]-4-hydroxy-2-pyrrolidinyl)methyl ester
aatgtggtatactgatgaagt

SEQ ID NO: 999 - RNA, 21 nt, synthetic construct
  source 1..21: mol_type = other RNA
  modified_base 1: mod_base = OTHER; note = 2'-O-methylguanosine-3'-phosphorothioate
  modified_base 2: mod_base = OTHER; note = 2'-O-methyluridine-3'-phosphorothioate
  modified_base 3: mod_base = OTHER; note = 2'-O-methyladenosine-3'-phosphate
  modified_base 4: mod_base = OTHER; note = 2'-O-methyluridine-3'-phosphate
  modified_base 5: mod_base = OTHER; note = 2'-O-methyladenosine-3'-phosphate
  modified_base 6: mod_base = OTHER; note = 2'-O-methylcytidine-3'-phosphate
  modified_base 7: mod_base = OTHER; note = 2'-deoxy-2'-fluorouridine-3'-phosphate
  modified_base 8: mod_base = OTHER; note = 2'-O-methylguanosine-3'-phosphate
  modified_base 9: mod_base = OTHER; note = 2'-deoxy-2'-fluoroadenosine-3'-phosphate
  modified_base 10: mod_base = OTHER; note = 2'-deoxy-2'-fluorouridine-3'-phosphate
  modified_base 11: mod_base = OTHER; note = 2'-deoxy-2'-fluoroguanosine-3'-phosphate
  modified_base 12: mod_base = OTHER; note = 2'-O-methyladenosine-3'-phosphate
  modified_base 13: mod_base = OTHER; note = 2'-O-methyladenosine-3'-phosphate
  modified_base 14: mod_base = OTHER; note = 2'-O-methylguanosine-3'-phosphate
  modified_base 15: mod_base = OTHER; note = 2'-O-methyladenosine-3'-phosphate
  modified_base 16: mod_base = OTHER; note = 2'-O-methylcytidine-3'-phosphate
  modified_base 17: mod_base = OTHER; note = 2'-O-methylcytidine-3'-phosphate
  modified_base 18: mod_base = OTHER; note = 2'-O-methyladenosine-3'-phosphate
  modified_base 19: mod_base = OTHER; note = 2'-O-methyluridine-3'-phosphate
  modified_base 20: mod_base = OTHER; note = 2'-O-methylguanosine-3'-phosphate
  modified_base 21: mod_base = OTHER; note = 2'-O-methyluridine-3'-phosphate ((2S,4R)-1-[29-[[2-(acetylamino)-2-deoxy-beta-D-galactopyra nosyl]oxy]-14,14-bis[[3-[[3-[[5-[[2-(acetylamino)-2-deoxy-b eta-D-galactopyranosyl]oxy]-1-oxopentyl]amino]propyl]amino] -3-oxopropoxy]methyl]-1,12,19,25-tetraoxo-16-oxa-13,20,24-t riazanonacos-1-yl]-4-hydroxy-2-pyrrolidinyl)methyl ester
gtatactgatgaagaccatgt

SEQ ID NO: 1000 - RNA, 21 nt, synthetic construct
  source 1..21: mol_type = other RNA
  modified_base 1: mod_base = OTHER; note = 2'-O-methyladenosine-3'-phosphorothioate
  modified_base 2: mod_base = OTHER; note = 2'-O-methyluridine-3'-phosphorothioate
  modified_base 3: mod_base = OTHER; note = 2'-O-methylguanosine-3'-phosphate
  modified_base 4: mod_base = OTHER; note = 2'-O-methyladenosine-3'-phosphate
  modified_base 5: mod_base = OTHER; note = 2'-O-methyladenosine-3'-phosphate
  modified_base 6: mod_base = OTHER; note = 2'-O-methylguanosine-3'-phosphate
  modified_base 7: mod_base = OTHER; note = 2'-deoxy-2'-fluoroadenosine-3'-phosphate
  modified_base 8: mod_base = OTHER; note = 2'-O-methylcytidine-3'-phosphate
  modified_base 9: mod_base = OTHER; note = 2'-deoxy-2'-fluorocytidine-3'-phosphate
  modified_base 10: mod_base = OTHER; note = 2'-deoxy-2'-fluoroadenosine-3'-phosphate
  modified_base 11: mod_base = OTHER; note = 2'-deoxy-2'-fluorouridine-3'-phosphate
  modified_base 12: mod_base = OTHER; note = 2'-O-methylguanosine-3'-phosphate
  modified_base 13: mod_base = OTHER; note = 2'-O-methylguanosine-3'-phosphate
  modified_base 14: mod_base = OTHER; note = 2'-O-methyladenosine-3'-phosphate
  modified_base 15: mod_base = OTHER; note = 2'-O-methyladenosine-3'-phosphate
  modified_base 16: mod_base = OTHER; note = 2'-O-methyluridine-3'-phosphate
  modified_base 17: mod_base = OTHER; note = 2'-O-methyladenosine-3'-phosphate
  modified_base 18: mod_base = OTHER; note = 2'-O-methylguanosine-3'-phosphate
  modified_base 19: mod_base = OTHER; note = 2'-O-methylcytidine-3'-phosphate
  modified_base 20: mod_base = OTHER; note = 2'-O-methyluridine-3'-phosphate
  modified_base 21: mod_base = OTHER; note = 2'-O-methyluridine-3'-phosphate ((2S,4R)-1-[29-[[2-(acetylamino)-2-deoxy-beta-D-galactopyra nosyl]oxy]-14,14-bis[[3-[[3-[[5-[[2-(acetylamino)-2-deoxy-b eta-D-galactopyranosyl]oxy]-1-oxopentyl]amino]propyl]amino] -3-oxopropoxy]methyl]-1,12,19,25-tetraoxo-16-oxa-13,20,24-t riazanonacos-1-yl]-4-hydroxy-2-pyrrolidinyl)methyl ester
atgaagaccatggaatagctt

SEQ ID NO: 1001 - RNA, 21 nt, synthetic construct
  source 1..21: mol_type = other RNA
  modified_base 1: mod_base = OTHER; note = 2'-O-methylcytidine-3'-phosphorothioate
  modified_base 2: mod_base = OTHER; note = 2'-O-methylcytidine-3'-phosphorothioate
  modified_base 3: mod_base = OTHER; note = 2'-O-methyladenosine-3'-phosphate
  modified_base 4: mod_base = OTHER; note = 2'-O-methyluridine-3'-phosphate
  modified_base 5: mod_base = OTHER; note = 2'-O-methylguanosine-3'-phosphate
  modified_base 6: mod_base = OTHER; note = 2'-O-methylguanosine-3'-phosphate
  modified_base 7: mod_base = OTHER; note = 2'-deoxy-2'-fluoroadenosine-3'-phosphate
  modified_base 8: mod_base = OTHER; note = 2'-O-methyladenosine-3'-phosphate
  modified_base 9: mod_base = OTHER; note = 2'-deoxy-2'-fluorouridine-3'-phosphate
  modified_base 10: mod_base = OTHER; note = 2'-deoxy-2'-fluoroadenosine-3'-phosphate
  modified_base 11: mod_base = OTHER; note = 2'-deoxy-2'-fluoroguanosine-3'-phosphate
  modified_base 12: mod_base = OTHER; note = 2'-O-methylcytidine-3'-phosphate
  modified_base 13: mod_base = OTHER; note = 2'-O-methyluridine-3'-phosphate
  modified_base 14: mod_base = OTHER; note = 2'-O-methyladenosine-3'-phosphate
  modified_base 15: mod_base = OTHER; note = 2'-O-methylguanosine-3'-phosphate
  modified_base 16: mod_base = OTHER; note = 2'-O-methylcytidine-3'-phosphate
  modified_base 17: mod_base = OTHER; note = 2'-O-methyladenosine-3'-phosphate
  modified_base 18: mod_base = OTHER; note = 2'-O-methylguanosine-3'-phosphate
  modified_base 19: mod_base = OTHER; note = 2'-O-methylcytidine-3'-phosphate
  modified_base 20: mod_base = OTHER; note = 2'-O-methyladenosine-3'-phosphate
  modified_base 21: mod_base = OTHER; note = 2'-O-methyluridine-3'-phosphate ((2S,4R)-1-[29-[[2-(acetylamino)-2-deoxy-beta-D-galactopyra nosyl]oxy]-14,14-bis[[3-[[3-[[5-[[2-(acetylamino)-2-deoxy-b eta-D-galactopyranosyl]oxy]-1-oxopentyl]amino]propyl]amino] -3-oxopropoxy]methyl]-1,12,19,25-tetraoxo-16-oxa-13,20,24-t riazanonacos-1-yl]-4-hydroxy-2-pyrrolidinyl)methyl ester
ccatggaatagctagcagcat

SEQ ID NO: 1002 - RNA, 21 nt, synthetic construct
  source 1..21: mol_type = other RNA
  modified_base 1: mod_base = OTHER; note = 2'-O-methyladenosine-3'-phosphorothioate
  modified_base 2: mod_base = OTHER; note = 2'-O-methyluridine-3'-phosphorothioate
  modified_base 3: mod_base = OTHER; note = 2'-O-methyladenosine-3'-phosphate
  modified_base 4: mod_base = OTHER; note = 2'-O-methylguanosine-3'-phosphate
  modified_base 5: mod_base = OTHER; note = 2'-O-methylcytidine-3'-phosphate
  modified_base 6: mod_base = OTHER; note = 2'-O-methyluridine-3'-phosphate
  modified_base 7: mod_base = OTHER; note = 2'-deoxy-2'-fluoroadenosine-3'-phosphate
  modified_base 8: mod_base = OTHER; note = 2'-O-methylguanosine-3'-phosphate
  modified_base 9: mod_base = OTHER; note = 2'-deoxy-2'-fluorocytidine-3'-phosphate
  modified_base 10: mod_base = OTHER; note = 2'-deoxy-2'-fluoroadenosine-3'-phosphate
  modified_base 11: mod_base = OTHER; note = 2'-deoxy-2'-fluoroguanosine-3'-phosphate
  modified_base 12: mod_base = OTHER; note = 2'-O-methylcytidine-3'-phosphate
  modified_base 13: mod_base = OTHER; note = 2'-O-methyladenosine-3'-phosphate
  modified_base 14: mod_base = OTHER; note = 2'-O-methylcytidine-3'-phosphate
  modified_base 15: mod_base = OTHER; note = 2'-O-methyladenosine-3'-phosphate
  modified_base 16: mod_base = OTHER; note = 2'-O-methylguanosine-3'-phosphate
  modified_base 17: mod_base = OTHER; note = 2'-O-methylcytidine-3'-phosphate
  modified_base 18: mod_base = OTHER; note = 2'-O-methyladenosine-3'-phosphate
  modified_base 19: mod_base = OTHER; note = 2'-O-methylcytidine-3'-phosphate
  modified_base 20: mod_base = OTHER; note = 2'-O-methyladenosine-3'-phosphate
  modified_base 21: mod_base = OTHER; note = 2'-O-methyluridine-3'-phosphate ((2S,4R)-1-[29-[[2-(acetylamino)-2-deoxy-beta-D-galactopyra nosyl]oxy]-14,14-bis[[3-[[3-[[5-[[2-(acetylamino)-2-deoxy-b eta-D-galactopyranosyl]oxy]-1-oxopentyl]amino]propyl]amino] -3-oxopropoxy]methyl]-1,12,19,25-tetraoxo-16-oxa-13,20,24-t riazanonacos-1-yl]-4-hydroxy-2-pyrrolidinyl)methyl ester
atagctagcagcacagcacat

SEQ ID NO: 1003 - RNA, 21 nt, synthetic construct
  source 1..21: mol_type = other RNA
  modified_base 1: mod_base = OTHER; note = 2'-O-methylcytidine-3'-phosphorothioate
  modified_base 2: mod_base = OTHER; note = 2'-O-methyladenosine-3'-phosphorothioate
  modified_base 3: mod_base = OTHER; note = 2'-O-methylguanosine-3'-phosphate
  modified_base 4: mod_base = OTHER; note = 2'-O-methylcytidine-3'-phosphate
  modified_base 5: mod_base = OTHER; note = 2'-O-methyladenosine-3'-phosphate
  modified_base 6: mod_base = OTHER; note = 2'-O-methylcytidine-3'-phosphate
  modified_base 7: mod_base = OTHER; note = 2'-deoxy-2'-fluoroadenosine-3'-phosphate
  modified_base 8: mod_base = OTHER; note = 2'-O-methylguanosine-3'-phosphate
  modified_base 9: mod_base = OTHER; note = 2'-deoxy-2'-fluorocytidine-3'-phosphate
  modified_base 10: mod_base = OTHER; note = 2'-deoxy-2'-fluoroadenosine-3'-phosphate
  modified_base 11: mod_base = OTHER; note = 2'-deoxy-2'-fluorocytidine-3'-phosphate
  modified_base 12: mod_base = OTHER; note = 2'-O-methyladenosine-3'-phosphate
  modified_base 13: mod_base = OTHER; note = 2'-O-methylcytidine-3'-phosphate
  modified_base 14: mod_base = OTHER; note = 2'-O-methylcytidine-3'-phosphate
  modified_base 15: mod_base = OTHER; note = 2'-O-methyladenosine-3'-phosphate
  modified_base 16: mod_base = OTHER; note = 2'-O-methyladenosine-3'-phosphate
  modified_base 17: mod_base = OTHER; note = 2'-O-methylcytidine-3'-phosphate
  modified_base 18: mod_base = OTHER; note = 2'-O-methyladenosine-3'-phosphate
  modified_base 19: mod_base = OTHER; note = 2'-O-methyluridine-3'-phosphate
  modified_base 20: mod_base = OTHER; note = 2'-O-methyladenosine-3'-phosphate
  modified_base 21: mod_base = OTHER; note = 2'-O-methyluridine-3'-phosphate ((2S,4R)-1-[29-[[2-(acetylamino)-2-deoxy-beta-D-galactopyra nosyl]oxy]-14,14-bis[[3-[[3-[[5-[[2-(acetylamino)-2-deoxy-b eta-D-galactopyranosyl]oxy]-1-oxopentyl]amino]propyl]amino] -3-oxopropoxy]methyl]-1,12,19,25-tetraoxo-16-oxa-13,20,24-t riazanonacos-1-yl]-4-hydroxy-2-pyrrolidinyl)methyl ester
cagcacagcacaccaacatat

SEQ ID NO: 1004 - RNA, 21 nt, synthetic construct
  source 1..21: mol_type = other RNA
  modified_base 1: mod_base = OTHER; note = 2'-O-methyladenosine-3'-phosphorothioate
  modified_base 2: mod_base = OTHER; note = 2'-O-methylguanosine-3'-phosphorothioate
  modified_base 3: mod_base = OTHER; note = 2'-O-methylcytidine-3'-phosphate
  modified_base 4: mod_base = OTHER; note = 2'-O-methyladenosine-3'-phosphate
  modified_base 5: mod_base = OTHER; note = 2'-O-methylcytidine-3'-phosphate
  modified_base 6: mod_base = OTHER; note = 2'-O-methyladenosine-3'-phosphate
  modified_base 7: mod_base = OTHER; note = 2'-deoxy-2'-fluorocytidine-3'-phosphate
  modified_base 8: mod_base = OTHER; note = 2'-O-methylcytidine-3'-phosphate
  modified_base 9: mod_base = OTHER; note = 2'-deoxy-2'-fluoroadenosine-3'-phosphate
  modified_base 10: mod_base = OTHER; note = 2'-deoxy-2'-fluoroadenosine-3'-phosphate
  modified_base 11: mod_base = OTHER; note = 2'-deoxy-2'-fluorocytidine-3'-phosphate
  modified_base 12: mod_base = OTHER; note = 2'-O-methyladenosine-3'-phosphate
  modified_base 13: mod_base = OTHER; note = 2'-O-methyluridine-3'-phosphate
  modified_base 14: mod_base = OTHER; note = 2'-O-methyladenosine-3'-phosphate
  modified_base 15: mod_base = OTHER; note = 2'-O-methyluridine-3'-phosphate
  modified_base 16: mod_base = OTHER; note = 2'-O-methyladenosine-3'-phosphate
  modified_base 17: mod_base = OTHER; note = 2'-O-methyluridine-3'-phosphate
  modified_base 18: mod_base = OTHER; note = 2'-O-methyladenosine-3'-phosphate
  modified_base 19: mod_base = OTHER; note = 2'-O-methyluridine-3'-phosphate
  modified_base 20: mod_base = OTHER; note = 2'-O-methyladenosine-3'-phosphate
  modified_base 21: mod_base = OTHER; note = 2'-O-methyluridine-3'-phosphate ((2S,4R)-1-[29-[[2-(acetylamino)-2-deoxy-beta-D-galactopyra nosyl]oxy]-14,14-bis[[3-[[3-[[5-[[2-(acetylamino)-2-deoxy-b eta-D-galactopyranosyl]oxy]-1-oxopentyl]amino]propyl]amino] -3-oxopropoxy]methyl]-1,12,19,25-tetraoxo-16-oxa-13,20,24-t riazanonacos-1-yl]-4-hydroxy-2-pyrrolidinyl)methyl ester
agcacaccaacatatatatat

SEQ ID NO: 1005 - RNA, 21 nt, synthetic construct
  source 1..21: mol_type = other RNA
  modified_base 1: mod_base = OTHER; note = 2'-O-methylcytidine-3'-phosphorothioate
  modified_base 2: mod_base = OTHER; note = 2'-O-methylcytidine-3'-phosphorothioate
  modified_base 3: mod_base = OTHER; note = 2'-O-methyladenosine-3'-phosphate
  modified_base 4: mod_base = OTHER; note = 2'-O-methyladenosine-3'-phosphate
  modified_base 5: mod_base = OTHER; note = 2'-O-methylcytidine-3'-phosphate
  modified_base 6: mod_base = OTHER; note = 2'-O-methyladenosine-3'-phosphate
  modified_base 7: mod_base = OTHER; note = 2'-deoxy-2'-fluorouridine-3'-phosphate
  modified_base 8: mod_base = OTHER; note = 2'-O-methyladenosine-3'-phosphate
  modified_base 9: mod_base = OTHER; note = 2'-deoxy-2'-fluorouridine-3'-phosphate
  modified_base 10: mod_base = OTHER; note = 2'-deoxy-2'-fluoroadenosine-3'-phosphate
  modified_base 11: mod_base = OTHER; note = 2'-deoxy-2'-fluorouridine-3'-phosphate
  modified_base 12: mod_base = OTHER; note = 2'-O-methyladenosine-3'-phosphate
  modified_base 13: mod_base = OTHER; note = 2'-O-methyluridine-3'-phosphate
  modified_base 14: mod_base = OTHER; note = 2'-O-methyladenosine-3'-phosphate
  modified_base 15: mod_base = OTHER; note = 2'-O-methylcytidine-3'-phosphate
  modified_base 16: mod_base = OTHER; note = 2'-O-methylcytidine-3'-phosphate
  modified_base 17: mod_base = OTHER; note = 2'-O-methylcytidine-3'-phosphate
  modified_base 18: mod_base = OTHER; note = 2'-O-methyladenosine-3'-phosphate
  modified_base 19: mod_base = OTHER; note = 2'-O-methylcytidine-3'-phosphate
  modified_base 20: mod_base = OTHER; note = 2'-O-methyladenosine-3'-phosphate
  modified_base 21: mod_base = OTHER; note = 2'-O-methyluridine-3'-phosphate ((2S,4R)-1-[29-[[2-(acetylamino)-2-deoxy-beta-D-galactopyra nosyl]oxy]-14,14-bis[[3-[[3-[[5-[[2-(acetylamino)-2-deoxy-b eta-D-galactopyranosyl]oxy]-1-oxopentyl]amino]propyl]amino] -3-oxopropoxy]methyl]-1,12,19,25-tetraoxo-16-oxa-13,20,24-t riazanonacos-1-yl]-4-hydroxy-2-pyrrolidinyl)methyl ester
ccaacatatatatacccacat

SEQ ID NO: 1006 - RNA, 21 nt, synthetic construct
  source 1..21: mol_type = other RNA
  modified_base 1: mod_base = OTHER; note = 2'-O-methyluridine-3'-phosphorothioate
  modified_base 2: mod_base = OTHER; note = 2'-O-methyladenosine-3'-phosphorothioate
  modified_base 3: mod_base = OTHER; note = 2'-O-methylcytidine-3'-phosphate
  modified_base 4: mod_base = OTHER; note = 2'-O-methylcytidine-3'-phosphate
  modified_base 5: mod_base = OTHER; note = 2'-O-methylcytidine-3'-phosphate
  modified_base 6: mod_base = OTHER; note = 2'-O-methyladenosine-3'-phosphate
  modified_base 7: mod_base = OTHER; note = 2'-deoxy-2'-fluorocytidine-3'-phosphate
  modified_base 8: mod_base = OTHER; note = 2'-O-methyladenosine-3'-phosphate
  modified_base 9: mod_base = OTHER; note = 2'-deoxy-2'-fluorouridine-3'-phosphate
  modified_base 10: mod_base = OTHER; note = 2'-deoxy-2'-fluoroguanosine-3'-phosphate
  modified_base 11: mod_base = OTHER; note = 2'-deoxy-2'-fluoroadenosine-3'-phosphate
  modified_base 12: mod_base = OTHER; note = 2'-O-methylguanosine-3'-phosphate
  modified_base 13: mod_base = OTHER; note = 2'-O-methylcytidine-3'-phosphate
  modified_base 14: mod_base = OTHER; note = 2'-O-methylcytidine-3'-phosphate
  modified_base 15: mod_base = OTHER; note = 2'-O-methyladenosine-3'-phosphate
  modified_base 16: mod_base = OTHER; note = 2'-O-methylcytidine-3'-phosphate
  modified_base 17: mod_base = OTHER; note = 2'-O-methyluridine-3'-phosphate
  modified_base 18: mod_base = OTHER; note = 2'-O-methyluridine-3'-phosphate
  modified_base 19: mod_base = OTHER; note = 2'-O-methylcytidine-3'-phosphate
  modified_base 20: mod_base = OTHER; note = 2'-O-methyladenosine-3'-phosphate
  modified_base 21: mod_base = OTHER; note = 2'-O-methyluridine-3'-phosphate ((2S,4R)-1-[29-[[2-(acetylamino)-2-deoxy-beta-D-galactopyra nosyl]oxy]-14,14-bis[[3-[[3-[[5-[[2-(acetylamino)-2-deoxy-b eta-D-galactopyranosyl]oxy]-1-oxopentyl]amino]propyl]amino] -3-oxopropoxy]methyl]-1,12,19,25-tetraoxo-16-oxa-13,20,24-t riazanonacos-1-yl]-4-hydroxy-2-pyrrolidinyl)methyl ester
tacccacatgagccacttcat

SEQ ID NO: 1007 - RNA, 21 nt, synthetic construct
  source 1..21: mol_type = other RNA
  modified_base 1: mod_base = OTHER; note = 2'-O-methylcytidine-3'-phosphorothioate
  modified_base 2: mod_base = OTHER; note = 2'-O-methyladenosine-3'-phosphorothioate
  modified_base 3: mod_base = OTHER; note = 2'-O-methyluridine-3'-phosphate
  modified_base 4: mod_base = OTHER; note = 2'-O-methylguanosine-3'-phosphate
  modified_base 5: mod_base = OTHER; note = 2'-O-methyladenosine-3'-phosphate
  modified_base 6: mod_base = OTHER; note = 2'-O-methylguanosine-3'-phosphate
  modified_base 7: mod_base = OTHER; note = 2'-deoxy-2'-fluorocytidine-3'-phosphate
  modified_base 8: mod_base = OTHER; note = 2'-O-methylcytidine-3'-phosphate
  modified_base 9: mod_base = OTHER; note = 2'-deoxy-2'-fluoroadenosine-3'-phosphate
  modified_base 10: mod_base = OTHER; note = 2'-deoxy-2'-fluorocytidine-3'-phosphate
  modified_base 11: mod_base = OTHER; note = 2'-deoxy-2'-fluorouridine-3'-phosphate
  modified_base 12: mod_base = OTHER; note = 2'-O-methyluridine-3'-phosphate
  modified_base 13: mod_base = OTHER; note = 2'-O-methylcytidine-3'-phosphate
  modified_base 14: mod_base = OTHER; note = 2'-O-methyladenosine-3'-phosphate
  modified_base 15: mod_base = OTHER; note = 2'-O-methyluridine-3'-phosphate
  modified_base 16: mod_base = OTHER; note = 2'-O-methyladenosine-3'-phosphate
  modified_base 17: mod_base = OTHER; note = 2'-O-methyladenosine-3'-phosphate
  modified_base 18: mod_base = OTHER; note = 2'-O-methyladenosine-3'-phosphate
  modified_base 19: mod_base = OTHER; note = 2'-O-methyladenosine-3'-phosphate
  modified_base 20: mod_base = OTHER; note = 2'-O-methylcytidine-3'-phosphate
  modified_base 21: mod_base = OTHER; note = 2'-O-methyluridine-3'-phosphate ((2S,4R)-1-[29-[[2-(acetylamino)-2-deoxy-beta-D-galactopyra nosyl]oxy]-14,14-bis[[3-[[3-[[5-[[2-(acetylamino)-2-deoxy-b eta-D-galactopyranosyl]oxy]-1-oxopentyl]amino]propyl]amino] -3-oxopropoxy]methyl]-1,12,19,25-tetraoxo-16-oxa-13,20,24-t riazanonacos-1-yl]-4-hydroxy-2-pyrrolidinyl)methyl ester
catgagccacttcataaaact

SEQ ID NO: 1008 - RNA, 21 nt, synthetic construct
  source 1..21: mol_type = other RNA
  modified_base 1: mod_base = OTHER; note = 2'-O-methylcytidine-3'-phosphorothioate
  modified_base 2: mod_base = OTHER; note = 2'-O-methylcytidine-3'-phosphorothioate
  modified_base 3: mod_base = OTHER; note = 2'-O-methyladenosine-3'-phosphate
  modified_base 4: mod_base = OTHER; note = 2'-O-methylcytidine-3'-phosphate
  modified_base 5: mod_base = OTHER; note = 2'-O-methyluridine-3'-phosphate
  modified_base 6: mod_base = OTHER; note = 2'-O-methyluridine-3'-phosphate
  modified_base 7: mod_base = OTHER; note = 2'-deoxy-2'-fluorocytidine-3'-phosphate
  modified_base 8: mod_base = OTHER; note = 2'-O-methyladenosine-3'-phosphate
  modified_base 9: mod_base = OTHER; note = 2'-deoxy-2'-fluorouridine-3'-phosphate
  modified_base 10: mod_base = OTHER; note = 2'-deoxy-2'-fluoroadenosine-3'-phosphate
  modified_base 11: mod_base = OTHER; note = 2'-deoxy-2'-fluoroadenosine-3'-phosphate
  modified_base 12: mod_base = OTHER; note = 2'-O-methyladenosine-3'-phosphate
  modified_base 13: mod_base = OTHER; note = 2'-O-methyladenosine-3'-phosphate
  modified_base 14: mod_base = OTHER; note = 2'-O-methylcytidine-3'-phosphate
  modified_base 15: mod_base = OTHER; note = 2'-O-methyladenosine-3'-phosphate
  modified_base 16: mod_base = OTHER; note = 2'-O-methyladenosine-3'-phosphate
  modified_base 17: mod_base = OTHER; note = 2'-O-methyluridine-3'-phosphate
  modified_base 18: mod_base = OTHER; note = 2'-O-methylguanosine-3'-phosphate
  modified_base 19: mod_base = OTHER; note = 2'-O-methyluridine-3'-phosphate
  modified_base 20: mod_base = OTHER; note = 2'-O-methyluridine-3'-phosphate
  modified_base 21: mod_base = OTHER; note = 2'-O-methyluridine-3'-phosphate ((2S,4R)-1-[29-[[2-(acetylamino)-2-deoxy-beta-D-galactopyra nosyl]oxy]-14,14-bis[[3-[[3-[[5-[[2-(acetylamino)-2-deoxy-b eta-D-galactopyranosyl]oxy]-1-oxopentyl]amino]propyl]amino] -3-oxopropoxy]methyl]-1,12,19,25-tetraoxo-16-oxa-13,20,24-t riazanonacos-1-yl]-4-hydroxy-2-pyrrolidinyl)methyl ester
ccacttcataaaacaatgttt

SEQ ID NO: 1009 - RNA, 21 nt, synthetic construct
  source 1..21: mol_type = other RNA
  modified_base 1: mod_base = OTHER; note = 2'-O-methyladenosine-3'-phosphorothioate
  modified_base 2: mod_base = OTHER; note = 2'-O-methyladenosine-3'-phosphorothioate
  modified_base 3: mod_base = OTHER; note = 2'-O-methylcytidine-3'-phosphate
  modified_base 4: mod_base = OTHER; note = 2'-O-methyladenosine-3'-phosphate
  modified_base 5: mod_base = OTHER; note = 2'-O-methyladenosine-3'-phosphate
  modified_base 6: mod_base = OTHER; note = 2'-O-methyluridine-3'-phosphate
  modified_base 7: mod_base = OTHER; note = 2'-deoxy-2'-fluoroguanosine-3'-phosphate
  modified_base 8: mod_base = OTHER; note = 2'-O-methyluridine-3'-phosphate
  modified_base 9: mod_base = OTHER; note = 2'-deoxy-2'-fluorouridine-3'-phosphate
  modified_base 10: mod_base = OTHER; note = 2'-deoxy-2'-fluorouridine-3'-phosphate
  modified_base 11: mod_base = OTHER; note = 2'-deoxy-2'-fluorocytidine-3'-phosphate
  modified_base 12: mod_base = OTHER; note = 2'-O-methyluridine-3'-phosphate
  modified_base 13: mod_base = OTHER; note = 2'-O-methylcytidine-3'-phosphate
  modified_base 14: mod_base = OTHER; note = 2'-O-methyluridine-3'-phosphate
  modified_base 15: mod_base = OTHER; note = 2'-O-methyluridine-3'-phosphate
  modified_base 16: mod_base = OTHER; note = 2'-O-methyluridine-3'-phosphate
  modified_base 17: mod_base = OTHER; note = 2'-O-methyladenosine-3'-phosphate
  modified_base 18: mod_base = OTHER; note = 2'-O-methylcytidine-3'-phosphate
  modified_base 19: mod_base = OTHER; note = 2'-O-methylcytidine-3'-phosphate
  modified_base 20: mod_base = OTHER; note = 2'-O-methyluridine-3'-phosphate
  modified_base 21: mod_base = OTHER; note = 2'-O-methyluridine-3'-phosphate ((2S,4R)-1-[29-[[2-(acetylamino)-2-deoxy-beta-D-galactopyra nosyl]oxy]-14,14-bis[[3-[[3-[[5-[[2-(acetylamino)-2-deoxy-b eta-D-galactopyranosyl]oxy]-1-oxopentyl]amino]propyl]amino] -3-oxopropoxy]methyl]-1,12,19,25-tetraoxo-16-oxa-13,20,24-t riazanonacos-1-yl]-4-hydroxy-2-pyrrolidinyl)methyl ester
aacaatgtttctctttacctt

SEQ ID NO: 1010 - RNA, 21 nt, synthetic construct
  source 1..21: mol_type = other RNA
  modified_base 1: mod_base = OTHER; note = 2'-O-methylguanosine-3'-phosphorothioate
  modified_base 2: mod_base = OTHER; note = 2'-O-methyluridine-3'-phosphorothioate
  modified_base 3: mod_base = OTHER; note = 2'-O-methyluridine-3'-phosphate
  modified_base 4: mod_base = OTHER; note = 2'-O-methyluridine-3'-phosphate
  modified_base 5: mod_base = OTHER; note = 2'-O-methylcytidine-3'-phosphate
  modified_base 6: mod_base = OTHER; note = 2'-O-methyluridine-3'-phosphate
  modified_base 7: mod_base = OTHER; note = 2'-deoxy-2'-fluorocytidine-3'-phosphate
  modified_base 8: mod_base = OTHER; note = 2'-O-methyluridine-3'-phosphate
  modified_base 9: mod_base = OTHER; note = 2'-deoxy-2'-fluorouridine-3'-phosphate
  modified_base 10: mod_base = OTHER; note = 2'-deoxy-2'-fluorouridine-3'-phosphate
  modified_base 11: mod_base = OTHER; note = 2'-deoxy-2'-fluoroadenosine-3'-phosphate
  modified_base 12: mod_base = OTHER; note = 2'-O-methylcytidine-3'-phosphate
  modified_base 13: mod_base = OTHER; note = 2'-O-methylcytidine-3'-phosphate
  modified_base 14: mod_base = OTHER; note = 2'-O-methyluridine-3'-phosphate
  modified_base 15: mod_base = OTHER; note = 2'-O-methyluridine-3'-phosphate
  modified_base 16: mod_base = OTHER; note = 2'-O-methyladenosine-3'-phosphate
  modified_base 17: mod_base = OTHER; note = 2'-O-methylguanosine-3'-phosphate
  modified_base 18: mod_base = OTHER; note = 2'-O-methylcytidine-3'-phosphate
  modified_base 19: mod_base = OTHER; note = 2'-O-methyladenosine-3'-phosphate
  modified_base 20: mod_base = OTHER; note = 2'-O-methylcytidine-3'-phosphate
  modified_base 21: mod_base = OTHER; note = 2'-O-methyluridine-3'-phosphate ((2S,4R)-1-[29-[[2-(acetylamino)-2-deoxy-beta-D-galactopyra nosyl]oxy]-14,14-bis[[3-[[3-[[5-[[2-(acetylamino)-2-deoxy-b eta-D-galactopyranosyl]oxy]-1-oxopentyl]amino]propyl]amino] -3-oxopropoxy]methyl]-1,12,19,25-tetraoxo-16-oxa-13,20,24-t riazanonacos-1-yl]-4-hydroxy-2-pyrrolidinyl)methyl ester
gtttctctttaccttagcact

SEQ ID NO: 1011 - RNA, 21 nt, synthetic construct
  source 1..21: mol_type = other RNA
  modified_base 1: mod_base = OTHER; note = 2'-O-methyluridine-3'-phosphorothioate
  modified_base 2: mod_base = OTHER; note = 2'-O-methyluridine-3'-phosphorothioate
  modified_base 3: mod_base = OTHER; note = 2'-O-methyluridine-3'-phosphate
  modified_base 4: mod_base = OTHER; note = 2'-O-methyladenosine-3'-phosphate
  modified_base 5: mod_base = OTHER; note = 2'-O-methylcytidine-3'-phosphate
  modified_base 6: mod_base = OTHER; note = 2'-O-methylcytidine-3'-phosphate
  modified_base 7: mod_base = OTHER; note = 2'-deoxy-2'-fluorouridine-3'-phosphate
  modified_base 8: mod_base = OTHER; note = 2'-O-methyluridine-3'-phosphate
  modified_base 9: mod_base = OTHER; note = 2'-deoxy-2'-fluoroadenosine-3'-phosphate
  modified_base 10: mod_base = OTHER; note = 2'-deoxy-2'-fluoroguanosine-3'-phosphate
  modified_base 11: mod_base = OTHER; note = 2'-deoxy-2'-fluorocytidine-3'-phosphate
  modified_base 12: mod_base = OTHER; note = 2'-O-methyladenosine-3'-phosphate
  modified_base 13: mod_base = OTHER; note = 2'-O-methylcytidine-3'-phosphate
  modified_base 14: mod_base = OTHER; note = 2'-O-methylcytidine-3'-phosphate
  modified_base 15: mod_base = OTHER; note = 2'-O-methyluridine-3'-phosphate
  modified_base 16: mod_base = OTHER; note = 2'-O-methylcytidine-3'-phosphate
  modified_base 17: mod_base = OTHER; note = 2'-O-methyladenosine-3'-phosphate
  modified_base 18: mod_base = OTHER; note = 2'-O-methyladenosine-3'-phosphate
  modified_base 19: mod_base = OTHER; note = 2'-O-methyladenosine-3'-phosphate
  modified_base 20: mod_base = OTHER; note = 2'-O-methyladenosine-3'-phosphate
  modified_base 21: mod_base = OTHER; note = 2'-O-methyluridine-3'-phosphate ((2S,4R)-1-[29-[[2-(acetylamino)-2-deoxy-beta-D-galactopyra nosyl]oxy]-14,14-bis[[3-[[3-[[5-[[2-(acetylamino)-2-deoxy-b eta-D-galactopyranosyl]oxy]-1-oxopentyl]amino]propyl]amino] -3-oxopropoxy]methyl]-1,12,19,25-tetraoxo-16-oxa-13,20,24-t riazanonacos-1-yl]-4-hydroxy-2-pyrrolidinyl)methyl ester
tttaccttagcacctcaaaat

SEQ ID NO: 1012 - RNA, 21 nt, synthetic construct
  source 1..21: mol_type = other RNA
  modified_base 1: mod_base = OTHER; note = 2'-O-methyluridine-3'-phosphorothioate
  modified_base 2: mod_base = OTHER; note = 2'-O-methyluridine-3'-phosphorothioate
  modified_base 3: mod_base = OTHER; note = 2'-O-methyladenosine-3'-phosphate
  modified_base 4: mod_base = OTHER; note = 2'-O-methylguanosine-3'-phosphate
  modified_base 5: mod_base = OTHER; note = 2'-O-methylcytidine-3'-phosphate
  modified_base 6: mod_base = OTHER; note = 2'-O-methyladenosine-3'-phosphate
  modified_base 7: mod_base = OTHER; note = 2'-deoxy-2'-fluorocytidine-3'-phosphate
  modified_base 8: mod_base = OTHER; note = 2'-O-methylcytidine-3'-phosphate
  modified_base 9: mod_base = OTHER; note = 2'-deoxy-2'-fluorouridine-3'-phosphate
  modified_base 10: mod_base = OTHER; note = 2'-deoxy-2'-fluorocytidine-3'-phosphate
  modified_base 11: mod_base = OTHER; note = 2'-deoxy-2'-fluoroadenosine-3'-phosphate
  modified_base 12: mod_base = OTHER; note = 2'-O-methyladenosine-3'-phosphate
  modified_base 13: mod_base = OTHER; note = 2'-O-methyladenosine-3'-phosphate
  modified_base 14: mod_base = OTHER; note = 2'-O-methyladenosine-3'-phosphate
  modified_base 15: mod_base = OTHER; note = 2'-O-methyluridine-3'-phosphate
  modified_base 16: mod_base = OTHER; note = 2'-O-methyladenosine-3'-phosphate
  modified_base 17: mod_base = OTHER; note = 2'-O-methylcytidine-3'-phosphate
  modified_base 18: mod_base = OTHER; note = 2'-O-methylcytidine-3'-phosphate
  modified_base 19: mod_base = OTHER; note = 2'-O-methyladenosine-3'-phosphate
  modified_base 20: mod_base = OTHER; note = 2'-O-methyluridine-3'-phosphate
  modified_base 21: mod_base = OTHER; note = 2'-O-methyluridine-3'-phosphate ((2S,4R)-1-[29-[[2-(acetylamino)-2-deoxy-beta-D-galactopyra nosyl]oxy]-14,14-bis[[3-[[3-[[5-[[2-(acetylamino)-2-deoxy-b eta-D-galactopyranosyl]oxy]-1-oxopentyl]amino]propyl]amino] -3-oxopropoxy]methyl]-1,12,19,25-tetraoxo-16-oxa-13,20,24-t riazanonacos-1-yl]-4-hydroxy-2-pyrrolidinyl)methyl ester
ttagcacctcaaaataccatt

SEQ ID NO: 1013 - RNA, 21 nt, synthetic construct
  source 1..21: mol_type = other RNA
  modified_base 1: mod_base = OTHER; note = 2'-O-methylcytidine-3'-phosphorothioate
  modified_base 2: mod_base = OTHER; note = 2'-O-methyluridine-3'-phosphorothioate
  modified_base 3: mod_base = OTHER; note = 2'-O-methylcytidine-3'-phosphate
  modified_base 4: mod_base = OTHER; note = 2'-O-methyladenosine-3'-phosphate
  modified_base 5: mod_base = OTHER; note = 2'-O-methyladenosine-3'-phosphate
  modified_base 6: mod_base = OTHER; note = 2'-O-methyladenosine-3'-phosphate
  modified_base 7: mod_base = OTHER; note = 2'-deoxy-2'-fluoroadenosine-3'-phosphate
  modified_base 8: mod_base = OTHER; note = 2'-O-methyluridine-3'-phosphate
  modified_base 9: mod_base = OTHER; note = 2'-deoxy-2'-fluoroadenosine-3'-phosphate
  modified_base 10: mod_base = OTHER; note = 2'-deoxy-2'-fluorocytidine-3'-phosphate
  modified_base 11: mod_base = OTHER; note = 2'-deoxy-2'-fluorocytidine-3'-phosphate
  modified_base 12: mod_base = OTHER; note = 2'-O-methyladenosine-3'-phosphate
  modified_base 13: mod_base = OTHER; note = 2'-O-methyluridine-3'-phosphate
  modified_base 14: mod_base = OTHER; note = 2'-O-methylguanosine-3'-phosphate
  modified_base 15: mod_base = OTHER; note = 2'-O-methylcytidine-3'-phosphate
  modified_base 16: mod_base = OTHER; note = 2'-O-methylcytidine-3'-phosphate
  modified_base 17: mod_base = OTHER; note = 2'-O-methyladenosine-3'-phosphate
  modified_base 18: mod_base = OTHER; note = 2'-O-methyluridine-3'-phosphate
  modified_base 19: mod_base = OTHER; note = 2'-O-methyluridine-3'-phosphate
  modified_base 20: mod_base = OTHER; note = 2'-O-methyluridine-3'-phosphate
  modified_base 21: mod_base = OTHER; note = 2'-O-methyluridine-3'-phosphate ((2S,4R)-1-[29-[[2-(acetylamino)-2-deoxy-beta-D-galactopyra nosyl]oxy]-14,14-bis[[3-[[3-[[5-[[2-(acetylamino)-2-deoxy-b eta-D-galactopyranosyl]oxy]-1-oxopentyl]amino]propyl]amino] -3-oxopropoxy]methyl]-1,12,19,25-tetraoxo-16-oxa-13,20,24-t riazanonacos-1-yl]-4-hydroxy-2-pyrrolidinyl)methyl ester
ctcaaaataccatgccatttt

SEQ ID NO: 1014 - RNA, 21 nt, synthetic construct
  source 1..21: mol_type = other RNA
  modified_base 1: mod_base = OTHER; note = 2'-O-methyluridine-3'-phosphorothioate
  modified_base 2: mod_base = OTHER; note = 2'-O-methyladenosine-3'-phosphorothioate
  modified_base 3: mod_base = OTHER; note = 2'-O-methylcytidine-3'-phosphate
  modified_base 4: mod_base = OTHER; note = 2'-O-methylcytidine-3'-phosphate
  modified_base 5: mod_base = OTHER; note = 2'-O-methyladenosine-3'-phosphate
  modified_base 6: mod_base = OTHER; note = 2'-O-methyluridine-3'-phosphate
  modified_base 7: mod_base = OTHER; note = 2'-deoxy-2'-fluoroguanosine-3'-phosphate
  modified_base 8: mod_base = OTHER; note = 2'-O-methylcytidine-3'-phosphate
  modified_base 9: mod_base = OTHER; note = 2'-deoxy-2'-fluorocytidine-3'-phosphate
  modified_base 10: mod_base = OTHER; note = 2'-deoxy-2'-fluoroadenosine-3'-phosphate
  modified_base 11: mod_base = OTHER; note = 2'-deoxy-2'-fluorouridine-3'-phosphate
  modified_base 12: mod_base = OTHER; note = 2'-O-methyluridine-3'-phosphate
  modified_base 13: mod_base = OTHER; note = 2'-O-methyluridine-3'-phosphate
  modified_base 14: mod_base = OTHER; note = 2'-O-methyladenosine-3'-phosphate
  modified_base 15: mod_base = OTHER; note = 2'-O-methyladenosine-3'-phosphate
  modified_base 16: mod_base = OTHER; note = 2'-O-methyladenosine-3'-phosphate
  modified_base 17: mod_base = OTHER; note = 2'-O-methylguanosine-3'-phosphate
  modified_base 18: mod_base = OTHER; note = 2'-O-methylcytidine-3'-phosphate
  modified_base 19: mod_base = OTHER; note = 2'-O-methyluridine-3'-phosphate
  modified_base 20: mod_base = OTHER; note = 2'-O-methyluridine-3'-phosphate
  modified_base 21: mod_base = OTHER; note = 2'-O-methyluridine-3'-phosphate ((2S,4R)-1-[29-[[2-(acetylamino)-2-deoxy-beta-D-galactopyra nosyl]oxy]-14,14-bis[[3-[[3-[[5-[[2-(acetylamino)-2-deoxy-b eta-D-galactopyranosyl]oxy]-1-oxopentyl]amino]propyl]amino] -3-oxopropoxy]methyl]-1,12,19,25-tetraoxo-16-oxa-13,20,24-t riazanonacos-1-yl]-4-hydroxy-2-pyrrolidinyl)methyl ester
taccatgccatttaaagcttt

SEQ ID NO: 1015 - RNA, 21 nt, synthetic construct
  source 1..21: mol_type = other RNA
  modified_base 1: mod_base = OTHER; note = 2'-O-methyluridine-3'-phosphorothioate
  modified_base 2: mod_base = OTHER; note = 2'-O-methyluridine-3'-phosphorothioate
  modified_base 3: mod_base = OTHER; note = 2'-O-methyluridine-3'-phosphate
  modified_base 4: mod_base = OTHER; note = 2'-O-methyluridine-3'-phosphate
  modified_base 5: mod_base = OTHER; note = 2'-O-methylcytidine-3'-phosphate
  modified_base 6: mod_base = OTHER; note = 2'-O-methyladenosine-3'-phosphate
  modified_base 7: mod_base = OTHER; note = 2'-deoxy-2'-fluorouridine-3'-phosphate
  modified_base 8: mod_base = OTHER; note = 2'-O-methyluridine-3'-phosphate
  modified_base 9: mod_base = OTHER; note = 2'-deoxy-2'-fluoroadenosine-3'-phosphate
  modified_base 10: mod_base = OTHER; note = 2'-deoxy-2'-fluorouridine-3'-phosphate
  modified_base 11: mod_base = OTHER; note = 2'-deoxy-2'-fluorocytidine-3'-phosphate
  modified_base 12: mod_base = OTHER; note = 2'-O-methyluridine-3'-phosphate
  modified_base 13: mod_base = OTHER; note = 2'-O-methylcytidine-3'-phosphate
  modified_base 14: mod_base = OTHER; note = 2'-O-methyladenosine-3'-phosphate
  modified_base 15: mod_base = OTHER; note = 2'-O-methyladenosine-3'-phosphate
  modified_base 16: mod_base = OTHER; note = 2'-O-methyladenosine-3'-phosphate
  modified_base 17: mod_base = OTHER; note = 2'-O-methyladenosine-3'-phosphate
  modified_base 18: mod_base = OTHER; note = 2'-O-methylcytidine-3'-phosphate
  modified_base 19: mod_base = OTHER; note = 2'-O-methyluridine-3'-phosphate
  modified_base 20: mod_base = OTHER; note = 2'-O-methylguanosine-3'-phosphate
  modified_base 21: mod_base = OTHER; note = 2'-O-methyluridine-3'-phosphate ((2S,4R)-1-[29-[[2-(acetylamino)-2-deoxy-beta-D-galactopyra nosyl]oxy]-14,14-bis[[3-[[3-[[5-[[2-(acetylamino)-2-deoxy-b eta-D-galactopyranosyl]oxy]-1-oxopentyl]amino]propyl]amino] -3-oxopropoxy]methyl]-1,12,19,25-tetraoxo-16-oxa-13,20,24-t riazanonacos-1-yl]-4-hydroxy-2-pyrrolidinyl)methyl ester
ttttcattatctcaaaactgt

SEQ ID NO: 1016 - RNA, 21 nt, synthetic construct
  source 1..21: mol_type = other RNA
  modified_base 1: mod_base = OTHER; note = 2'-O-methyluridine-3'-phosphorothioate
  modified_base 2: mod_base = OTHER; note = 2'-O-methylcytidine-3'-phosphorothioate
  modified_base 3: mod_base = OTHER; note = 2'-O-methyluridine-3'-phosphate
  modified_base 4: mod_base = OTHER; note = 2'-O-methylcytidine-3'-phosphate
  modified_base 5: mod_base = OTHER; note = 2'-O-methyladenosine-3'-phosphate
  modified_base 6: mod_base = OTHER; note = 2'-O-methyladenosine-3'-phosphate
  modified_base 7: mod_base = OTHER; note = 2'-deoxy-2'-fluoroadenosine-3'-phosphate
  modified_base 8: mod_base = OTHER; note = 2'-O-methyladenosine-3'-phosphate
  modified_base 9: mod_base = OTHER; note = 2'-deoxy-2'-fluorocytidine-3'-phosphate
  modified_base 10: mod_base = OTHER; note = 2'-deoxy-2'-fluorouridine-3'-phosphate
  modified_base 11: mod_base = OTHER; note = 2'-deoxy-2'-fluoroguanosine-3'-phosphate
  modified_base 12: mod_base = OTHER; note = 2'-O-methylcytidine-3'-phosphate
  modified_base 13: mod_base = OTHER; note = 2'-O-methyladenosine-3'-phosphate
  modified_base 14: mod_base = OTHER; note = 2'-O-methylcytidine-3'-phosphate
  modified_base 15: mod_base = OTHER; note = 2'-O-methyluridine-3'-phosphate
  modified_base 16: mod_base = OTHER; note = 2'-O-methylguanosine-3'-phosphate
  modified_base 17: mod_base = OTHER; note = 2'-O-methyluridine-3'-phosphate
  modified_base 18: mod_base = OTHER; note = 2'-O-methylcytidine-3'-phosphate
  modified_base 19: mod_base = OTHER; note = 2'-O-methyladenosine-3'-phosphate
  modified_base 20: mod_base = OTHER; note = 2'-O-methyladenosine-3'-phosphate
  modified_base 21: mod_base = OTHER; note = 2'-O-methyluridine-3'-phosphate ((2S,4R)-1-[29-[[2-(acetylamino)-2-deoxy-beta-D-galactopyra nosyl]oxy]-14,14-bis[[3-[[3-[[5-[[2-(acetylamino)-2-deoxy-b eta-D-galactopyranosyl]oxy]-1-oxopentyl]amino]propyl]amino] -3-oxopropoxy]methyl]-1,12,19,25-tetraoxo-16-oxa-13,20,24-t riazanonacos-1-yl]-4-hydroxy-2-pyrrolidinyl)methyl ester
tctcaaaactgcactgtcaat

SEQ ID NO: 1017 - RNA, 21 nt, synthetic construct
  source 1..21: mol_type = other RNA
  modified_base 1: mod_base = OTHER; note = 2'-O-methylcytidine-3'-phosphorothioate
  modified_base 2: mod_base = OTHER; note = 2'-O-methyluridine-3'-phosphorothioate
  modified_base 3: mod_base = OTHER; note = 2'-O-methylguanosine-3'-phosphate
  modified_base 4: mod_base = OTHER; note = 2'-O-methylcytidine-3'-phosphate
  modified_base 5: mod_base = OTHER; note = 2'-O-methyladenosine-3'-phosphate
  modified_base 6: mod_base = OTHER; note = 2'-O-methylcytidine-3'-phosphate
  modified_base 7: mod_base = OTHER; note = 2'-deoxy-2'-fluorouridine-3'-phosphate
  modified_base 8: mod_base = OTHER; note = 2'-O-methylguanosine-3'-phosphate
  modified_base 9: mod_base = OTHER; note = 2'-deoxy-2'-fluorouridine-3'-phosphate
  modified_base 10: mod_base = OTHER; note = 2'-deoxy-2'-fluorocytidine-3'-phosphate
  modified_base 11: mod_base = OTHER; note = 2'-deoxy-2'-fluoroadenosine-3'-phosphate
  modified_base 12: mod_base = OTHER; note = 2'-O-methyladenosine-3'-phosphate
  modified_base 13: mod_base = OTHER; note = 2'-O-methylguanosine-3'-phosphate
  modified_base 14: mod_base = OTHER; note = 2'-O-methyladenosine-3'-phosphate
  modified_base 15: mod_base = OTHER; note = 2'-O-methyluridine-3'-phosphate
  modified_base 16: mod_base = OTHER; note = 2'-O-methylguanosine-3'-phosphate
  modified_base 17: mod_base = OTHER; note = 2'-O-methyladenosine-3'-phosphate
  modified_base 18: mod_base = OTHER; note = 2'-O-methyluridine-3'-phosphate
  modified_base 19: mod_base = OTHER; note = 2'-O-methylguanosine-3'-phosphate
  modified_base 20: mod_base = OTHER; note = 2'-O-methyladenosine-3'-phosphate
  modified_base 21: mod_base = OTHER; note = 2'-O-methyluridine-3'-phosphate ((2S,4R)-1-[29-[[2-(acetylamino)-2-deoxy-beta-D-galactopyra nosyl]oxy]-14,14-bis[[3-[[3-[[5-[[2-(acetylamino)-2-deoxy-b eta-D-galactopyranosyl]oxy]-1-oxopentyl]amino]propyl]amino] -3-oxopropoxy]methyl]-1,12,19,25-tetraoxo-16-oxa-13,20,24-t riazanonacos-1-yl]-4-hydroxy-2-pyrrolidinyl)methyl ester
ctgcactgtcaagatgatgat

SEQ ID NO: 1018 - RNA, 21 nt, synthetic construct
  source 1..21: mol_type = other RNA
  modified_base 1: mod_base = OTHER; note = 2'-O-methylcytidine-3'-phosphorothioate
  modified_base 2: mod_base = OTHER; note = 2'-O-methyladenosine-3'-phosphorothioate
  modified_base 3: mod_base = OTHER; note = 2'-O-methyladenosine-3'-phosphate
  modified_base 4: mod_base = OTHER; note = 2'-O-methylguanosine-3'-phosphate
  modified_base 5: mod_base = OTHER; note = 2'-O-methyladenosine-3'-phosphate
  modified_base 6: mod_base = OTHER; note = 2'-O-methyluridine-3'-phosphate
  modified_base 7: mod_base = OTHER; note = 2'-deoxy-2'-fluoroguanosine-3'-phosphate
  modified_base 8: mod_base = OTHER; note = 2'-O-methyladenosine-3'-phosphate
  modified_base 9: mod_base = OTHER; note = 2'-deoxy-2'-fluorouridine-3'-phosphate
  modified_base 10: mod_base = OTHER; note = 2'-deoxy-2'-fluoroguanosine-3'-phosphate
  modified_base 11: mod_base = OTHER; note = 2'-deoxy-2'-fluoroadenosine-3'-phosphate
  modified_base 12: mod_base = OTHER; note = 2'-O-methyluridine-3'-phosphate
  modified_base 13: mod_base = OTHER; note = 2'-O-methylguanosine-3'-phosphate
  modified_base 14: mod_base = OTHER; note = 2'-O-methyladenosine-3'-phosphate
  modified_base 15: mod_base = OTHER; note = 2'-O-methyluridine-3'-phosphate
  modified_base 16: mod_base = OTHER; note = 2'-O-methylcytidine-3'-phosphate
  modified_base 17: mod_base = OTHER; note = 2'-O-methyluridine-3'-phosphate
  modified_base 18: mod_base = OTHER; note = 2'-O-methyluridine-3'-phosphate
  modified_base 19: mod_base = OTHER; note = 2'-O-methyluridine-3'-phosphate
  modified_base 20: mod_base = OTHER; note = 2'-O-methyladenosine-3'-phosphate
  modified_base 21: mod_base = OTHER; note = 2'-O-methyluridine-3'-phosphate ((2S,4R)-1-[29-[[2-(acetylamino)-2-deoxy-beta-D-galactopyra nosyl]oxy]-14,14-bis[[3-[[3-[[5-[[2-(acetylamino)-2-deoxy-b eta-D-galactopyranosyl]oxy]-1-oxopentyl]amino]propyl]amino] -3-oxopropoxy]methyl]-1,12,19,25-tetraoxo-16-oxa-13,20,24-t riazanonacos-1-yl]-4-hydroxy-2-pyrrolidinyl)methyl ester
caagatgatgatgatctttat

SEQ ID NO: 1019 - RNA, 21 nt, synthetic construct
  source 1..21: mol_type = other RNA
  modified_base 1: mod_base = OTHER; note = 2'-O-methylguanosine-3'-phosphorothioate
  modified_base 2: mod_base = OTHER; note = 2'-O-methyladenosine-3'-phosphorothioate
  modified_base 3: mod_base = OTHER; note = 2'-O-methyluridine-3'-phosphate
  modified_base 4: mod_base = OTHER; note = 2'-O-methylcytidine-3'-phosphate
  modified_base 5: mod_base = OTHER; note = 2'-O-methyluridine-3'-phosphate
  modified_base 6: mod_base = OTHER; note = 2'-O-methyluridine-3'-phosphate
  modified_base 7: mod_base = OTHER; note = 2'-deoxy-2'-fluorouridine-3'-phosphate
  modified_base 8: mod_base = OTHER; note = 2'-O-methyladenosine-3'-phosphate
  modified_base 9: mod_base = OTHER; note = 2'-deoxy-2'-fluoroadenosine-3'-phosphate
  modified_base 10: mod_base = OTHER; note = 2'-deoxy-2'-fluoroadenosine-3'-phosphate
  modified_base 11: mod_base = OTHER; note = 2'-deoxy-2'-fluoroadenosine-3'-phosphate
  modified_base 12: mod_base = OTHER; note = 2'-O-methyluridine-3'-phosphate
  modified_base 13: mod_base = OTHER; note = 2'-O-methyladenosine-3'-phosphate
  modified_base 14: mod_base = OTHER; note = 2'-O-methylcytidine-3'-phosphate
  modified_base 15: mod_base = OTHER; note = 2'-O-methyladenosine-3'-phosphate
  modified_base 16: mod_base = OTHER; note = 2'-O-methylcytidine-3'-phosphate
  modified_base 17: mod_base = OTHER; note = 2'-O-methyladenosine-3'-phosphate
  modified_base 18: mod_base = OTHER; note = 2'-O-methylcytidine-3'-phosphate
  modified_base 19: mod_base = OTHER; note = 2'-O-methyluridine-3'-phosphate
  modified_base 20: mod_base = OTHER; note = 2'-O-methylcytidine-3'-phosphate
  modified_base 21: mod_base = OTHER; note = 2'-O-methyluridine-3'-phosphate ((2S,4R)-1-[29-[[2-(acetylamino)-2-deoxy-beta-D-galactopyra nosyl]oxy]-14,14-bis[[3-[[3-[[5-[[2-(acetylamino)-2-deoxy-b eta-D-galactopyranosyl]oxy]-1-oxopentyl]amino]propyl]amino] -3-oxopropoxy]methyl]-1,12,19,25-tetraoxo-16-oxa-13,20,24-t riazanonacos-1-yl]-4-hydroxy-2-pyrrolidinyl)methyl ester
gatctttaaaatacacactct

SEQ ID NO: 1020 - RNA, 21 nt, synthetic construct
  source 1..21: mol_type = other RNA
  modified_base 1: mod_base = OTHER; note = 2'-O-methyladenosine-3'-phosphorothioate
  modified_base 2: mod_base = OTHER; note = 2'-O-methyladenosine-3'-phosphorothioate
  modified_base 3: mod_base = OTHER; note = 2'-O-methyladenosine-3'-phosphate
  modified_base 4: mod_base = OTHER; note = 2'-O-methyluridine-3'-phosphate
  modified_base 5: mod_base = OTHER; note = 2'-O-methyladenosine-3'-phosphate
  modified_base 6: mod_base = OTHER; note = 2'-O-methylcytidine-3'-phosphate
  modified_base 7: mod_base = OTHER; note = 2'-deoxy-2'-fluoroadenosine-3'-phosphate
  modified_base 8: mod_base = OTHER; note = 2'-O-methylcytidine-3'-phosphate
  modified_base 9: mod_base = OTHER; note = 2'-deoxy-2'-fluoroadenosine-3'-phosphate
  modified_base 10: mod_base = OTHER; note = 2'-deoxy-2'-fluorocytidine-3'-phosphate
  modified_base 11: mod_base = OTHER; note = 2'-deoxy-2'-fluorouridine-3'-phosphate
  modified_base 12: mod_base = OTHER; note = 2'-O-methylcytidine-3'-phosphate
  modified_base 13: mod_base = OTHER; note = 2'-O-methyladenosine-3'-phosphate
  modified_base 14: mod_base = OTHER; note = 2'-O-methyladenosine-3'-phosphate
  modified_base 15: mod_base = OTHER; note = 2'-O-methyladenosine-3'-phosphate
  modified_base 16: mod_base = OTHER; note = 2'-O-methyluridine-3'-phosphate
  modified_base 17: mod_base = OTHER; note = 2'-O-methylcytidine-3'-phosphate
  modified_base 18: mod_base = OTHER; note = 2'-O-methyladenosine-3'-phosphate
  modified_base 19: mod_base = OTHER; note = 2'-O-methyladenosine-3'-phosphate
  modified_base 20: mod_base = OTHER; note = 2'-O-methylguanosine-3'-phosphate
  modified_base 21: mod_base = OTHER; note = 2'-O-methyluridine-3'-phosphate ((2S,4R)-1-[29-[[2-(acetylamino)-2-deoxy-beta-D-galactopyra nosyl]oxy]-14,14-bis[[3-[[3-[[5-[[2-(acetylamino)-2-deoxy-b eta-D-galactopyranosyl]oxy]-1-oxopentyl]amino]propyl]amino] -3-oxopropoxy]methyl]-1,12,19,25-tetraoxo-16-oxa-13,20,24-t riazanonacos-1-yl]-4-hydroxy-2-pyrrolidinyl)methyl ester
aaatacacactcaaatcaagt

SEQ ID NO: 1021 - RNA, 21 nt, synthetic construct
  source 1..21: mol_type = other RNA
  modified_base 1: mod_base = OTHER; note = 2'-O-methyladenosine-3'-phosphorothioate
  modified_base 2: mod_base = OTHER; note = 2'-O-methylcytidine-3'-phosphorothioate
  modified_base 3: mod_base = OTHER; note = 2'-O-methyluridine-3'-phosphate
  modified_base 4: mod_base = OTHER; note = 2'-O-methylcytidine-3'-phosphate
  modified_base 5: mod_base = OTHER; note = 2'-O-methyladenosine-3'-phosphate
  modified_base 6: mod_base = OTHER; note = 2'-O-methyladenosine-3'-phosphate
  modified_base 7: mod_base = OTHER; note = 2'-deoxy-2'-fluoroadenosine-3'-phosphate
  modified_base 8: mod_base = OTHER; note = 2'-O-methyluridine-3'-phosphate
  modified_base 9: mod_base = OTHER; note = 2'-deoxy-2'-fluorocytidine-3'-phosphate
  modified_base 10: mod_base = OTHER; note = 2'-deoxy-2'-fluoroadenosine-3'-phosphate
  modified_base 11: mod_base = OTHER; note = 2'-deoxy-2'-fluoroadenosine-3'-phosphate
  modified_base 12: mod_base = OTHER; note = 2'-O-methylguanosine-3'-phosphate
  modified_base 13: mod_base = OTHER; note = 2'-O-methyladenosine-3'-phosphate
  modified_base 14: mod_base = OTHER; note = 2'-O-methyladenosine-3'-phosphate
  modified_base 15: mod_base = OTHER; note = 2'-O-methyladenosine-3'-phosphate
  modified_base 16: mod_base = OTHER; note = 2'-O-methylcytidine-3'-phosphate
  modified_base 17: mod_base = OTHER; note = 2'-O-methyluridine-3'-phosphate
  modified_base 18: mod_base = OTHER; note = 2'-O-methyluridine-3'-phosphate
  modified_base 19: mod_base = OTHER; note = 2'-O-methyladenosine-3'-phosphate
  modified_base 20: mod_base = OTHER; note = 2'-O-methyladenosine-3'-phosphate
  modified_base 21: mod_base = OTHER; note = 2'-O-methyluridine-3'-phosphate ((2S,4R)-1-[29-[[2-(acetylamino)-2-deoxy-beta-D-galactopyra nosyl]oxy]-14,14-bis[[3-[[3-[[5-[[2-(acetylamino)-2-deoxy-b eta-D-galactopyranosyl]oxy]-1-oxopentyl]amino]propyl]amino] -3-oxopropoxy]methyl]-1,12,19,25-tetraoxo-16-oxa-13,20,24-t riazanonacos-1-yl]-4-hydroxy-2-pyrrolidinyl)methyl ester
actcaaatcaagaaacttaat

SEQ ID NO: 1022 - RNA, 21 nt, synthetic construct
  source 1..21: mol_type = other RNA
  modified_base 1: mod_base = OTHER; note = 2'-O-methyladenosine-3'-phosphorothioate
  modified_base 2: mod_base = OTHER; note = 2'-O-methyluridine-3'-phosphorothioate
  modified_base 3: mod_base = OTHER; note = 2'-O-methylcytidine-3'-phosphate
  modified_base 4: mod_base = OTHER; note = 2'-O-methyladenosine-3'-phosphate
  modified_base 5: mod_base = OTHER; note = 2'-O-methyladenosine-3'-phosphate
  modified_base 6: mod_base = OTHER; note = 2'-O-methylguanosine-3'-phosphate
  modified_base 7: mod_base = OTHER; note = 2'-deoxy-2'-fluoroadenosine-3'-phosphate
  modified_base 8: mod_base = OTHER; note = 2'-O-methyladenosine-3'-phosphate
  modified_base 9: mod_base = OTHER; note = 2'-deoxy-2'-fluoroadenosine-3'-phosphate
  modified_base 10: mod_base = OTHER; note = 2'-deoxy-2'-fluorocytidine-3'-phosphate
  modified_base 11: mod_base = OTHER; note = 2'-deoxy-2'-fluorouridine-3'-phosphate
  modified_base 12: mod_base = OTHER; note = 2'-O-methyluridine-3'-phosphate
  modified_base 13: mod_base = OTHER; note = 2'-O-methyladenosine-3'-phosphate
  modified_base 14: mod_base = OTHER; note = 2'-O-methyladenosine-3'-phosphate
  modified_base 15: mod_base = OTHER; note = 2'-O-methylguanosine-3'-phosphate
  modified_base 16: mod_base = OTHER; note = 2'-O-methylguanosine-3'-phosphate
  modified_base 17: mod_base = OTHER; note = 2'-O-methyluridine-3'-phosphate
  modified_base 18: mod_base = OTHER; note = 2'-O-methyluridine-3'-phosphate
  modified_base 19: mod_base = OTHER; note = 2'-O-methyladenosine-3'-phosphate
  modified_base 20: mod_base = OTHER; note = 2'-O-methylcytidine-3'-phosphate
  modified_base 21: mod_base = OTHER; note = 2'-O-methyluridine-3'-phosphate ((2S,4R)-1-[29-[[2-(acetylamino)-2-deoxy-beta-D-galactopyra nosyl]oxy]-14,14-bis[[3-[[3-[[5-[[2-(acetylamino)-2-deoxy-b eta-D-galactopyranosyl]oxy]-1-oxopentyl]amino]propyl]amino] -3-oxopropoxy]methyl]-1,12,19,25-tetraoxo-16-oxa-13,20,24-t riazanonacos-1-yl]-4-hydroxy-2-pyrrolidinyl)methyl ester
atcaagaaacttaaggttact

SEQ ID NO: 1023 - RNA, 21 nt, synthetic construct
  source 1..21: mol_type = other RNA
  modified_base 1: mod_base = OTHER; note = 2'-O-methyladenosine-3'-phosphorothioate
  modified_base 2: mod_base = OTHER; note = 2'-O-methylcytidine-3'-phosphorothioate
  modified_base 3: mod_base = OTHER; note = 2'-O-methyluridine-3'-phosphate
  modified_base 4: mod_base = OTHER; note = 2'-O-methyluridine-3'-phosphate
  modified_base 5: mod_base = OTHER; note = 2'-O-methyladenosine-3'-phosphate
  modified_base 6: mod_base = OTHER; note = 2'-O-methyladenosine-3'-phosphate
  modified_base 7: mod_base = OTHER; note = 2'-deoxy-2'-fluoroguanosine-3'-phosphate
  modified_base 8: mod_base = OTHER; note = 2'-O-methylguanosine-3'-phosphate
  modified_base 9: mod_base = OTHER; note = 2'-deoxy-2'-fluorouridine-3'-phosphate
  modified_base 10: mod_base = OTHER; note = 2'-deoxy-2'-fluorouridine-3'-phosphate
  modified_base 11: mod_base = OTHER; note = 2'-deoxy-2'-fluoroadenosine-3'-phosphate
  modified_base 12: mod_base = OTHER; note = 2'-O-methylcytidine-3'-phosphate
  modified_base 13: mod_base = OTHER; note = 2'-O-methylcytidine-3'-phosphate
  modified_base 14: mod_base = OTHER; note = 2'-O-methyluridine-3'-phosphate
  modified_base 15: mod_base = OTHER; note = 2'-O-methyluridine-3'-phosphate
  modified_base 16: mod_base = OTHER; note = 2'-O-methyluridine-3'-phosphate
  modified_base 17: mod_base = OTHER; note = 2'-O-methylguanosine-3'-phosphate
  modified_base 18: mod_base = OTHER; note = 2'-O-methyluridine-3'-phosphate
  modified_base 19: mod_base = OTHER; note = 2'-O-methyluridine-3'-phosphate
  modified_base 20: mod_base = OTHER; note = 2'-O-methylcytidine-3'-phosphate
  modified_base 21: mod_base = OTHER; note = 2'-O-methyluridine-3'-phosphate ((2S,4R)-1-[29-[[2-(acetylamino)-2-deoxy-beta-D-galactopyra nosyl]oxy]-14,14-bis[[3-[[3-[[5-[[2-(acetylamino)-2-deoxy-b eta-D-galactopyranosyl]oxy]-1-oxopentyl]amino]propyl]amino] -3-oxopropoxy]methyl]-1,12,19,25-tetraoxo-16-oxa-13,20,24-t riazanonacos-1-yl]-4-hydroxy-2-pyrrolidinyl)methyl ester
acttaaggttacctttgttct

SEQ ID NO: 1024 - RNA, 21 nt, synthetic construct
  source 1..21: mol_type = other RNA
  modified_base 1: mod_base = OTHER; note = 2'-O-methyladenosine-3'-phosphorothioate
  modified_base 2: mod_base = OTHER; note = 2'-O-methylcytidine-3'-phosphorothioate
  modified_base 3: mod_base = OTHER; note = 2'-O-methylcytidine-3'-phosphate
  modified_base 4: mod_base = OTHER; note = 2'-O-methyluridine-3'-phosphate
  modified_base 5: mod_base = OTHER; note = 2'-O-methyluridine-3'-phosphate
  modified_base 6: mod_base = OTHER; note = 2'-O-methyluridine-3'-phosphate
  modified_base 7: mod_base = OTHER; note = 2'-deoxy-2'-fluoroguanosine-3'-phosphate
  modified_base 8: mod_base = OTHER; note = 2'-O-methyluridine-3'-phosphate
  modified_base 9: mod_base = OTHER; note = 2'-deoxy-2'-fluorouridine-3'-phosphate
  modified_base 10: mod_base = OTHER; note = 2'-deoxy-2'-fluorocytidine-3'-phosphate
  modified_base 11: mod_base = OTHER; note = 2'-deoxy-2'-fluorocytidine-3'-phosphate
  modified_base 12: mod_base = OTHER; note = 2'-O-methylcytidine-3'-phosphate
  modified_base 13: mod_base = OTHER; note = 2'-O-methyladenosine-3'-phosphate
  modified_base 14: mod_base = OTHER; note = 2'-O-methyladenosine-3'-phosphate
  modified_base 15: mod_base = OTHER; note = 2'-O-methyladenosine-3'-phosphate
  modified_base 16: mod_base = OTHER; note = 2'-O-methyluridine-3'-phosphate
  modified_base 17: mod_base = OTHER; note = 2'-O-methyluridine-3'-phosphate
  modified_base 18: mod_base = OTHER; note = 2'-O-methyluridine-3'-phosphate
  modified_base 19: mod_base = OTHER; note = 2'-O-methylcytidine-3'-phosphate
  modified_base 20: mod_base = OTHER; note = 2'-O-methyladenosine-3'-phosphate
  modified_base 21: mod_base = OTHER; note = 2'-O-methyluridine-3'-phosphate ((2S,4R)-1-[29-[[2-(acetylamino)-2-deoxy-beta-D-galactopyra nosyl]oxy]-14,14-bis[[3-[[3-[[5-[[2-(acetylamino)-2-deoxy-b eta-D-galactopyranosyl]oxy]-1-oxopentyl]amino]propyl]amino] -3-oxopropoxy]methyl]-1,12,19,25-tetraoxo-16-oxa-13,20,24-t riazanonacos-1-yl]-4-hydroxy-2-pyrrolidinyl)methyl ester
acctttgttcccaaatttcat

SEQ ID NO: 1025 - RNA, 21 nt, synthetic construct
  source 1..21: mol_type = other RNA
  modified_base 1: mod_base = OTHER; note = 2'-O-methylguanosine-3'-phosphorothioate
  modified_base 2: mod_base = OTHER; note = 2'-O-methyluridine-3'-phosphorothioate
  modified_base 3: mod_base = OTHER; note = 2'-O-methyluridine-3'-phosphate
  modified_base 4: mod_base = OTHER; note = 2'-O-methylcytidine-3'-phosphate
  modified_base 5: mod_base = OTHER; note = 2'-O-methylcytidine-3'-phosphate
  modified_base 6: mod_base = OTHER; note = 2'-O-methylcytidine-3'-phosphate
  modified_base 7: mod_base = OTHER; note = 2'-deoxy-2'-fluoroadenosine-3'-phosphate
  modified_base 8: mod_base = OTHER; note = 2'-O-methyladenosine-3'-phosphate
  modified_base 9: mod_base = OTHER; note = 2'-deoxy-2'-fluoroadenosine-3'-phosphate
  modified_base 10: mod_base = OTHER; note = 2'-deoxy-2'-fluorouridine-3'-phosphate
  modified_base 11: mod_base = OTHER; note = 2'-deoxy-2'-fluorouridine-3'-phosphate
  modified_base 12: mod_base = OTHER; note = 2'-O-methyluridine-3'-phosphate
  modified_base 13: mod_base = OTHER; note = 2'-O-methylcytidine-3'-phosphate
  modified_base 14: mod_base = OTHER; note = 2'-O-methyladenosine-3'-phosphate
  modified_base 15: mod_base = OTHER; note = 2'-O-methyluridine-3'-phosphate
  modified_base 16: mod_base = OTHER; note = 2'-O-methyladenosine-3'-phosphate
  modified_base 17: mod_base = OTHER; note = 2'-O-methylcytidine-3'-phosphate
  modified_base 18: mod_base = OTHER; note = 2'-O-methylcytidine-3'-phosphate
  modified_base 19: mod_base = OTHER; note = 2'-O-methyluridine-3'-phosphate
  modified_base 20: mod_base = OTHER; note = 2'-O-methyladenosine-3'-phosphate
  modified_base 21: mod_base = OTHER; note = 2'-O-methyluridine-3'-phosphate ((2S,4R)-1-[29-[[2-(acetylamino)-2-deoxy-beta-D-galactopyra nosyl]oxy]-14,14-bis[[3-[[3-[[5-[[2-(acetylamino)-2-deoxy-b eta-D-galactopyranosyl]oxy]-1-oxopentyl]amino]propyl]amino] -3-oxopropoxy]methyl]-1,12,19,25-tetraoxo-16-oxa-13,20,24-t riazanonacos-1-yl]-4-hydroxy-2-pyrrolidinyl)methyl ester
gttcccaaatttcatacctat

SEQ ID NO: 1026 - RNA, 21 nt, synthetic construct
  source 1..21: mol_type = other RNA
  modified_base 1: mod_base = OTHER; note = 2'-O-methyladenosine-3'-phosphorothioate
  modified_base 2: mod_base = OTHER; note = 2'-O-methyladenosine-3'-phosphorothioate
  modified_base 3: mod_base = OTHER; note = 2'-O-methyladenosine-3'-phosphate
  modified_base 4: mod_base = OTHER; note = 2'-O-methyluridine-3'-phosphate
  modified_base 5: mod_base = OTHER; note = 2'-O-methyluridine-3'-phosphate
  modified_base 6: mod_base = OTHER; note = 2'-O-methyluridine-3'-phosphate
  modified_base 7: mod_base = OTHER; note = 2'-deoxy-2'-fluorocytidine-3'-phosphate
  modified_base 8: mod_base = OTHER; note = 2'-O-methyladenosine-3'-phosphate
  modified_base 9: mod_base = OTHER; note = 2'-deoxy-2'-fluorouridine-3'-phosphate
  modified_base 10: mod_base = OTHER; note = 2'-deoxy-2'-fluoroadenosine-3'-phosphate
  modified_base 11: mod_base = OTHER; note = 2'-deoxy-2'-fluorocytidine-3'-phosphate
  modified_base 12: mod_base = OTHER; note = 2'-O-methylcytidine-3'-phosphate
  modified_base 13: mod_base = OTHER; note = 2'-O-methyluridine-3'-phosphate
  modified_base 14: mod_base = OTHER; note = 2'-O-methyladenosine-3'-phosphate
  modified_base 15: mod_base = OTHER; note = 2'-O-methyluridine-3'-phosphate
  modified_base 16: mod_base = OTHER; note = 2'-O-methylcytidine-3'-phosphate
  modified_base 17: mod_base = OTHER; note = 2'-O-methyladenosine-3'-phosphate
  modified_base 18: mod_base = OTHER; note = 2'-O-methyluridine-3'-phosphate
  modified_base 19: mod_base = OTHER; note = 2'-O-methylcytidine-3'-phosphate
  modified_base 20: mod_base = OTHER; note = 2'-O-methyluridine-3'-phosphate
  modified_base 21: mod_base = OTHER; note = 2'-O-methyluridine-3'-phosphate ((2S,4R)-1-[29-[[2-(acetylamino)-2-deoxy-beta-D-galactopyra nosyl]oxy]-14,14-bis[[3-[[3-[[5-[[2-(acetylamino)-2-deoxy-b eta-D-galactopyranosyl]oxy]-1-oxopentyl]amino]propyl]amino] -3-oxopropoxy]methyl]-1,12,19,25-tetraoxo-16-oxa-13,20,24-t riazanonacos-1-yl]-4-hydroxy-2-pyrrolidinyl)methyl ester
aaatttcatacctatcatctt

SEQ ID NO: 1027 - RNA, 21 nt, synthetic construct
  source 1..21: mol_type = other RNA
  modified_base 1: mod_base = OTHER; note = 2'-O-methyladenosine-3'-phosphorothioate
  modified_base 2: mod_base = OTHER; note = 2'-O-methyluridine-3'-phosphorothioate
  modified_base 3: mod_base = OTHER; note = 2'-O-methyladenosine-3'-phosphate
  modified_base 4: mod_base = OTHER; note = 2'-O-methylcytidine-3'-phosphate
  modified_base 5: mod_base = OTHER; note = 2'-O-methylcytidine-3'-phosphate
  modified_base 6: mod_base = OTHER; note = 2'-O-methyluridine-3'-phosphate
  modified_base 7: mod_base = OTHER; note = 2'-deoxy-2'-fluoroadenosine-3'-phosphate
  modified_base 8: mod_base = OTHER; note = 2'-O-methyluridine-3'-phosphate
  modified_base 9: mod_base = OTHER; note = 2'-deoxy-2'-fluorocytidine-3'-phosphate
  modified_base 10: mod_base = OTHER; note = 2'-deoxy-2'-fluoroadenosine-3'-phosphate
  modified_base 11: mod_base = OTHER; note = 2'-deoxy-2'-fluorouridine-3'-phosphate
  modified_base 12: mod_base = OTHER; note = 2'-O-methylcytidine-3'-phosphate
  modified_base 13: mod_base = OTHER; note = 2'-O-methyluridine-3'-phosphate
  modified_base 14: mod_base = OTHER; note = 2'-O-methyluridine-3'-phosphate
  modified_base 15: mod_base = OTHER; note = 2'-O-methyladenosine-3'-phosphate
  modified_base 16: mod_base = OTHER; note = 2'-O-methyladenosine-3'-phosphate
  modified_base 17: mod_base = OTHER; note = 2'-O-methylguanosine-3'-phosphate
  modified_base 18: mod_base = OTHER; note = 2'-O-methyluridine-3'-phosphate
  modified_base 19: mod_base = OTHER; note = 2'-O-methyladenosine-3'-phosphate
  modified_base 20: mod_base = OTHER; note = 2'-O-methylguanosine-3'-phosphate
  modified_base 21: mod_base = OTHER; note = 2'-O-methyluridine-3'-phosphate ((2S,4R)-1-[29-[[2-(acetylamino)-2-deoxy-beta-D-galactopyra nosyl]oxy]-14,14-bis[[3-[[3-[[5-[[2-(acetylamino)-2-deoxy-b eta-D-galactopyranosyl]oxy]-1-oxopentyl]amino]propyl]amino] -3-oxopropoxy]methyl]-1,12,19,25-tetraoxo-16-oxa-13,20,24-t riazanonacos-1-yl]-4-hydroxy-2-pyrrolidinyl)methyl ester
atacctatcatcttaagtagt

SEQ ID NO: 1028 - RNA, 21 nt, synthetic construct
  source 1..21: mol_type = other RNA
  modified_base 1: mod_base = OTHER; note = 2'-O-methylcytidine-3'-phosphorothioate
  modified_base 2: mod_base = OTHER; note = 2'-O-methyladenosine-3'-phosphorothioate
  modified_base 3: mod_base = OTHER; note = 2'-O-methyluridine-3'-phosphate
  modified_base 4: mod_base = OTHER; note = 2'-O-methylcytidine-3'-phosphate
  modified_base 5: mod_base = OTHER; note = 2'-O-methyluridine-3'-phosphate
  modified_base 6: mod_base = OTHER; note = 2'-O-methyluridine-3'-phosphate
  modified_base 7: mod_base = OTHER; note = 2'-deoxy-2'-fluoroadenosine-3'-phosphate
  modified_base 8: mod_base = OTHER; note = 2'-O-methyladenosine-3'-phosphate
  modified_base 9: mod_base = OTHER; note = 2'-deoxy-2'-fluoroguanosine-3'-phosphate
  modified_base 10: mod_base = OTHER; note = 2'-deoxy-2'-fluorouridine-3'-phosphate
  modified_base 11: mod_base = OTHER; note = 2'-deoxy-2'-fluoroadenosine-3'-phosphate
  modified_base 12: mod_base = OTHER; note = 2'-O-methylguanosine-3'-phosphate
  modified_base 13: mod_base = OTHER; note = 2'-O-methylguanosine-3'-phosphate
  modified_base 14: mod_base = OTHER; note = 2'-O-methylguanosine-3'-phosphate
  modified_base 15: mod_base = OTHER; note = 2'-O-methyladenosine-3'-phosphate
  modified_base 16: mod_base = OTHER; note = 2'-O-methylcytidine-3'-phosphate
  modified_base 17: mod_base = OTHER; note = 2'-O-methyluridine-3'-phosphate
  modified_base 18: mod_base = OTHER; note = 2'-O-methyluridine-3'-phosphate
  modified_base 19: mod_base = OTHER; note = 2'-O-methylcytidine-3'-phosphate
  modified_base 20: mod_base = OTHER; note = 2'-O-methyluridine-3'-phosphate
  modified_base 21: mod_base = OTHER; note = 2'-O-methyluridine-3'-phosphate ((2S,4R)-1-[29-[[2-(acetylamino)-2-deoxy-beta-D-galactopyra nosyl]oxy]-14,14-bis[[3-[[3-[[5-[[2-(acetylamino)-2-deoxy-b eta-D-galactopyranosyl]oxy]-1-oxopentyl]amino]propyl]amino] -3-oxopropoxy]methyl]-1,12,19,25-tetraoxo-16-oxa-13,20,24-t riazanonacos-1-yl]-4-hydroxy-2-pyrrolidinyl)methyl ester
catcttaagtagggacttctt

SEQ ID NO: 1029 - RNA, 21 nt, synthetic construct
  source 1..21: mol_type = other RNA
  modified_base 1: mod_base = OTHER; note = 2'-O-methyladenosine-3'-phosphorothioate
  modified_base 2: mod_base = OTHER; note = 2'-O-methylguanosine-3'-phosphorothioate
  modified_base 3: mod_base = OTHER; note = 2'-O-methylguanosine-3'-phosphate
  modified_base 4: mod_base = OTHER; note = 2'-O-methylguanosine-3'-phosphate
  modified_base 5: mod_base = OTHER; note = 2'-O-methyladenosine-3'-phosphate
  modified_base 6: mod_base = OTHER; note = 2'-O-methylcytidine-3'-phosphate
  modified_base 7: mod_base = OTHER; note = 2'-deoxy-2'-fluorouridine-3'-phosphate
  modified_base 8: mod_base = OTHER; note = 2'-O-methyluridine-3'-phosphate
  modified_base 9: mod_base = OTHER; note = 2'-deoxy-2'-fluorocytidine-3'-phosphate
  modified_base 10: mod_base = OTHER; note = 2'-deoxy-2'-fluorouridine-3'-phosphate
  modified_base 11: mod_base = OTHER; note = 2'-deoxy-2'-fluoroguanosine-3'-phosphate
  modified_base 12: mod_base = OTHER; note = 2'-O-methyluridine-3'-phosphate
  modified_base 13: mod_base = OTHER; note = 2'-O-methylcytidine-3'-phosphate
  modified_base 14: mod_base = OTHER; note = 2'-O-methyluridine-3'-phosphate
  modified_base 15: mod_base = OTHER; note = 2'-O-methyluridine-3'-phosphate
  modified_base 16: mod_base = OTHER; note = 2'-O-methylcytidine-3'-phosphate
  modified_base 17: mod_base = OTHER; note = 2'-O-methyladenosine-3'-phosphate
  modified_base 18: mod_base = OTHER; note = 2'-O-methylcytidine-3'-phosphate
  modified_base 19: mod_base = OTHER; note = 2'-O-methyladenosine-3'-phosphate
  modified_base 20: mod_base = OTHER; note = 2'-O-methyladenosine-3'-phosphate
  modified_base 21: mod_base = OTHER; note = 2'-O-methyluridine-3'-phosphate ((2S,4R)-1-[29-[[2-(acetylamino)-2-deoxy-beta-D-galactopyra nosyl]oxy]-14,14-bis[[3-[[3-[[5-[[2-(acetylamino)-2-deoxy-b eta-D-galactopyranosyl]oxy]-1-oxopentyl]amino]propyl]amino] -3-oxopropoxy]methyl]-1,12,19,25-tetraoxo-16-oxa-13,20,24-t riazanonacos-1-yl]-4-hydroxy-2-pyrrolidinyl)methyl ester
agggacttctgtcttcacaat

SEQ ID NO: 1030 - RNA, 21 nt, synthetic construct
  source 1..21: mol_type = other RNA
  modified_base 1: mod_base = OTHER; note = 2'-O-methyluridine-3'-phosphorothioate
  modified_base 2: mod_base = OTHER; note = 2'-O-methylguanosine-3'-phosphorothioate
  modified_base 3: mod_base = OTHER; note = 2'-O-methyluridine-3'-phosphate
  modified_base 4: mod_base = OTHER; note = 2'-O-methylcytidine-3'-phosphate
  modified_base 5: mod_base = OTHER; note = 2'-O-methyluridine-3'-phosphate
  modified_base 6: mod_base = OTHER; note = 2'-O-methyluridine-3'-phosphate
  modified_base 7: mod_base = OTHER; note = 2'-deoxy-2'-fluorocytidine-3'-phosphate
  modified_base 8: mod_base = OTHER; note = 2'-O-methyladenosine-3'-phosphate
  modified_base 9: mod_base = OTHER; note = 2'-deoxy-2'-fluorocytidine-3'-phosphate
  modified_base 10: mod_base = OTHER; note = 2'-deoxy-2'-fluoroadenosine-3'-phosphate
  modified_base 11: mod_base = OTHER; note = 2'-deoxy-2'-fluoroadenosine-3'-phosphate
  modified_base 12: mod_base = OTHER; note = 2'-O-methylcytidine-3'-phosphate
  modified_base 13: mod_base = OTHER; note = 2'-O-methyladenosine-3'-phosphate
  modified_base 14: mod_base = OTHER; note = 2'-O-methylguanosine-3'-phosphate
  modified_base 15: mod_base = OTHER; note = 2'-O-methyladenosine-3'-phosphate
  modified_base 16: mod_base = OTHER; note = 2'-O-methyluridine-3'-phosphate
  modified_base 17: mod_base = OTHER; note = 2'-O-methyluridine-3'-phosphate
  modified_base 18: mod_base = OTHER; note = 2'-O-methyladenosine-3'-phosphate
  modified_base 19: mod_base = OTHER; note = 2'-O-methyluridine-3'-phosphate
  modified_base 20: mod_base = OTHER; note = 2'-O-methyluridine-3'-phosphate
  modified_base 21: mod_base = OTHER; note = 2'-O-methyluridine-3'-phosphate ((2S,4R)-1-[29-[[2-(acetylamino)-2-deoxy-beta-D-galactopyra nosyl]oxy]-14,14-bis[[3-[[3-[[5-[[2-(acetylamino)-2-deoxy-b eta-D-galactopyranosyl]oxy]-1-oxopentyl]amino]propyl]amino] -3-oxopropoxy]methyl]-1,12,19,25-tetraoxo-16-oxa-13,20,24-t riazanonacos-1-yl]-4-hydroxy-2-pyrrolidinyl)methyl ester
tgtcttcacaacagattattt

SEQ ID NO: 1031 - RNA, 21 nt, synthetic construct
  source 1..21: mol_type = other RNA
  modified_base 1: mod_base = OTHER; note = 2'-O-methyladenosine-3'-phosphorothioate
  modified_base 2: mod_base = OTHER; note = 2'-O-methylcytidine-3'-phosphorothioate
  modified_base 3: mod_base = OTHER; note = 2'-O-methyladenosine-3'-phosphate
  modified_base 4: mod_base = OTHER; note = 2'-O-methyladenosine-3'-phosphate
  modified_base 5: mod_base = OTHER; note = 2'-O-methylcytidine-3'-phosphate
  modified_base 6: mod_base = OTHER; note = 2'-O-methyladenosine-3'-phosphate
  modified_base 7: mod_base = OTHER; note = 2'-deoxy-2'-fluoroguanosine-3'-phosphate
  modified_base 8: mod_base = OTHER; note = 2'-O-methyladenosine-3'-phosphate
  modified_base 9: mod_base = OTHER; note = 2'-deoxy-2'-fluorouridine-3'-phosphate
  modified_base 10: mod_base = OTHER; note = 2'-deoxy-2'-fluorouridine-3'-phosphate
  modified_base 11: mod_base = OTHER; note = 2'-deoxy-2'-fluoroadenosine-3'-phosphate
  modified_base 12: mod_base = OTHER; note = 2'-O-methyluridine-3'-phosphate
  modified_base 13: mod_base = OTHER; note = 2'-O-methyluridine-3'-phosphate
  modified_base 14: mod_base = OTHER; note = 2'-O-methyladenosine-3'-phosphate
  modified_base 15: mod_base = OTHER; note = 2'-O-methylcytidine-3'-phosphate
  modified_base 16: mod_base = OTHER; note = 2'-O-methylcytidine-3'-phosphate
  modified_base 17: mod_base = OTHER; note = 2'-O-methyluridine-3'-phosphate
  modified_base 18: mod_base = OTHER; note = 2'-O-methyluridine-3'-phosphate
  modified_base 19: mod_base = OTHER; note = 2'-O-methyladenosine-3'-phosphate
  modified_base 20: mod_base = OTHER; note = 2'-O-methylcytidine-3'-phosphate
  modified_base 21: mod_base = OTHER; note = 2'-O-methyluridine-3'-phosphate ((2S,4R)-1-[29-[[2-(acetylamino)-2-deoxy-beta-D-galactopyra nosyl]oxy]-14,14-bis[[3-[[3-[[5-[[2-(acetylamino)-2-deoxy-b eta-D-galactopyranosyl]oxy]-1-oxopentyl]amino]propyl]amino] -3-oxopropoxy]methyl]-1,12,19,25-tetraoxo-16-oxa-13,20,24-t riazanonacos-1-yl]-4-hydroxy-2-pyrrolidinyl)methyl ester
acaacagattattaccttact

SEQ ID NO: 1032 - RNA, 21 nt, synthetic construct
  source 1..21: mol_type = other RNA
  modified_base 1: mod_base = OTHER; note = 2'-O-methyladenosine-3'-phosphorothioate
  modified_base 2: mod_base = OTHER; note = 2'-O-methyluridine-3'-phosphorothioate
  modified_base 3: mod_base = OTHER; note = 2'-O-methyluridine-3'-phosphate
  modified_base 4: mod_base = OTHER; note = 2'-O-methyladenosine-3'-phosphate
  modified_base 5: mod_base = OTHER; note = 2'-O-methyluridine-3'-phosphate
  modified_base 6: mod_base = OTHER; note = 2'-O-methyluridine-3'-phosphate
  modified_base 7: mod_base = OTHER; note = 2'-deoxy-2'-fluoroadenosine-3'-phosphate
  modified_base 8: mod_base = OTHER; note = 2'-O-methylcytidine-3'-phosphate
  modified_base 9: mod_base = OTHER; note = 2'-deoxy-2'-fluorocytidine-3'-phosphate
  modified_base 10: mod_base = OTHER; note = 2'-deoxy-2'-fluorouridine-3'-phosphate
  modified_base 11: mod_base = OTHER; note = 2'-deoxy-2'-fluorouridine-3'-phosphate
  modified_base 12: mod_base = OTHER; note = 2'-O-methyladenosine-3'-phosphate
  modified_base 13: mod_base = OTHER; note = 2'-O-methylcytidine-3'-phosphate
  modified_base 14: mod_base = OTHER; note = 2'-O-methyladenosine-3'-phosphate
  modified_base 15: mod_base = OTHER; note = 2'-O-methylguanosine-3'-phosphate
  modified_base 16: mod_base = OTHER; note = 2'-O-methyladenosine-3'-phosphate
  modified_base 17: mod_base = OTHER; note = 2'-O-methyladenosine-3'-phosphate
  modified_base 18: mod_base = OTHER; note = 2'-O-methylguanosine-3'-phosphate
  modified_base 19: mod_base = OTHER; note = 2'-O-methyluridine-3'-phosphate
  modified_base 20: mod_base = OTHER; note = 2'-O-methyluridine-3'-phosphate
  modified_base 21: mod_base = OTHER; note = 2'-O-methyluridine-3'-phosphate ((2S,4R)-1-[29-[[2-(acetylamino)-2-deoxy-beta-D-galactopyra nosyl]oxy]-14,14-bis[[3-[[3-[[5-[[2-(acetylamino)-2-deoxy-b eta-D-galactopyranosyl]oxy]-1-oxopentyl]amino]propyl]amino] -3-oxopropoxy]methyl]-1,12,19,25-tetraoxo-16-oxa-13,20,24-t riazanonacos-1-yl]-4-hydroxy-2-pyrrolidinyl)methyl ester
attattaccttacagaagttt

SEQ ID NO: 1033 - RNA, 21 nt, synthetic construct
  source 1..21: mol_type = other RNA
  modified_base 1: mod_base = OTHER; note = 2'-O-methyladenosine-3'-phosphorothioate
  modified_base 2: mod_base = OTHER; note = 2'-O-methylcytidine-3'-phosphorothioate
  modified_base 3: mod_base = OTHER; note = 2'-O-methylcytidine-3'-phosphate
  modified_base 4: mod_base = OTHER; note = 2'-O-methyluridine-3'-phosphate
  modified_base 5: mod_base = OTHER; note = 2'-O-methyluridine-3'-phosphate
  modified_base 6: mod_base = OTHER; note = 2'-O-methyladenosine-3'-phosphate
  modified_base 7: mod_base = OTHER; note = 2'-deoxy-2'-fluorocytidine-3'-phosphate
  modified_base 8: mod_base = OTHER; note = 2'-O-methyladenosine-3'-phosphate
  modified_base 9: mod_base = OTHER; note = 2'-deoxy-2'-fluoroguanosine-3'-phosphate
  modified_base 10: mod_base = OTHER; note = 2'-deoxy-2'-fluoroadenosine-3'-phosphate
  modified_base 11: mod_base = OTHER; note = 2'-deoxy-2'-fluoroadenosine-3'-phosphate
  modified_base 12: mod_base = OTHER; note = 2'-O-methylguanosine-3'-phosphate
  modified_base 13: mod_base = OTHER; note = 2'-O-methyluridine-3'-phosphate
  modified_base 14: mod_base = OTHER; note = 2'-O-methyluridine-3'-phosphate
  modified_base 15: mod_base = OTHER; note = 2'-O-methyluridine-3'-phosphate
  modified_base 16: mod_base = OTHER; note = 2'-O-methylguanosine-3'-phosphate
  modified_base 17: mod_base = OTHER; note = 2'-O-methyladenosine-3'-phosphate
  modified_base 18: mod_base = OTHER; note = 2'-O-methyladenosine-3'-phosphate
  modified_base 19: mod_base = OTHER; note = 2'-O-methyluridine-3'-phosphate
  modified_base 20: mod_base = OTHER; note = 2'-O-methyluridine-3'-phosphate
  modified_base 21: mod_base = OTHER; note = 2'-O-methyluridine-3'-phosphate ((2S,4R)-1-[29-[[2-(acetylamino)-2-deoxy-beta-D-galactopyra nosyl]oxy]-14,14-bis[[3-[[3-[[5-[[2-(acetylamino)-2-deoxy-b eta-D-galactopyranosyl]oxy]-1-oxopentyl]amino]propyl]amino] -3-oxopropoxy]methyl]-1,12,19,25-tetraoxo-16-oxa-13,20,24-t riazanonacos-1-yl]-4-hydroxy-2-pyrrolidinyl)methyl ester
accttacagaagtttgaattt

SEQ ID NO: 1034 - RNA, 21 nt, synthetic construct
  source 1..21: mol_type = other RNA
  modified_base 1: mod_base = OTHER; note = 2'-O-methyladenosine-3'-phosphorothioate
  modified_base 2: mod_base = OTHER; note = 2'-O-methylguanosine-3'-phosphorothioate
  modified_base 3: mod_base = OTHER; note = 2'-O-methyladenosine-3'-phosphate
  modified_base 4: mod_base = OTHER; note = 2'-O-methyladenosine-3'-phosphate
  modified_base 5: mod_base = OTHER; note = 2'-O-methylguanosine-3'-phosphate
  modified_base 6: mod_base = OTHER; note = 2'-O-methyluridine-3'-phosphate
  modified_base 7: mod_base = OTHER; note = 2'-deoxy-2'-fluorouridine-3'-phosphate
  modified_base 8: mod_base = OTHER; note = 2'-O-methyluridine-3'-phosphate
  modified_base 9: mod_base = OTHER; note = 2'-deoxy-2'-fluoroguanosine-3'-phosphate
  modified_base 10: mod_base = OTHER; note = 2'-deoxy-2'-fluoroadenosine-3'-phosphate
  modified_base 11: mod_base = OTHER; note = 2'-deoxy-2'-fluoroadenosine-3'-phosphate
  modified_base 12: mod_base = OTHER; note = 2'-O-methyluridine-3'-phosphate
  modified_base 13: mod_base = OTHER; note = 2'-O-methyluridine-3'-phosphate
  modified_base 14: mod_base = OTHER; note = 2'-O-methyladenosine-3'-phosphate
  modified_base 15: mod_base = OTHER; note = 2'-O-methyluridine-3'-phosphate
  modified_base 16: mod_base = OTHER; note = 2'-O-methylcytidine-3'-phosphate
  modified_base 17: mod_base = OTHER; note = 2'-O-methylcytidine-3'-phosphate
  modified_base 18: mod_base = OTHER; note = 2'-O-methylguanosine-3'-phosphate
  modified_base 19: mod_base = OTHER; note = 2'-O-methylguanosine-3'-phosphate
  modified_base 20: mod_base = OTHER; note = 2'-O-methyluridine-3'-phosphate
  modified_base 21: mod_base = OTHER; note = 2'-O-methyluridine-3'-phosphate ((2S,4R)-1-[29-[[2-(acetylamino)-2-deoxy-beta-D-galactopyra nosyl]oxy]-14,14-bis[[3-[[3-[[5-[[2-(acetylamino)-2-deoxy-b eta-D-galactopyranosyl]oxy]-1-oxopentyl]amino]propyl]amino] -3-oxopropoxy]methyl]-1,12,19,25-tetraoxo-16-oxa-13,20,24-t riazanonacos-1-yl]-4-hydroxy-2-pyrrolidinyl)methyl ester
agaagtttgaattatccggtt

SEQ ID NO: 1035 - RNA, 21 nt, synthetic construct
  source 1..21: mol_type = other RNA
  modified_base 1: mod_base = OTHER; note = 2'-O-methyluridine-3'-phosphorothioate
  modified_base 2: mod_base = OTHER; note = 2'-O-methyluridine-3'-phosphorothioate
  modified_base 3: mod_base = OTHER; note = 2'-O-methylguanosine-3'-phosphate
  modified_base 4: mod_base = OTHER; note = 2'-O-methyladenosine-3'-phosphate
  modified_base 5: mod_base = OTHER; note = 2'-O-methyladenosine-3'-phosphate
  modified_base 6: mod_base = OTHER; note = 2'-O-methyluridine-3'-phosphate
  modified_base 7: mod_base = OTHER; note = 2'-deoxy-2'-fluorouridine-3'-phosphate
  modified_base 8: mod_base = OTHER; note = 2'-O-methyladenosine-3'-phosphate
  modified_base 9: mod_base = OTHER; note = 2'-deoxy-2'-fluorouridine-3'-phosphate
  modified_base 10: mod_base = OTHER; note = 2'-deoxy-2'-fluorocytidine-3'-phosphate
  modified_base 11: mod_base = OTHER; note = 2'-deoxy-2'-fluorocytidine-3'-phosphate
  modified_base 12: mod_base = OTHER; note = 2'-O-methylguanosine-3'-phosphate
  modified_base 13: mod_base = OTHER; note = 2'-O-methylguanosine-3'-phosphate
  modified_base 14: mod_base = OTHER; note = 2'-O-methyluridine-3'-phosphate
  modified_base 15: mod_base = OTHER; note = 2'-O-methylcytidine-3'-phosphate
  modified_base 16: mod_base = OTHER; note = 2'-O-methylguanosine-3'-phosphate
  modified_base 17: mod_base = OTHER; note = 2'-O-methylguanosine-3'-phosphate
  modified_base 18: mod_base = OTHER; note = 2'-O-methylguanosine-3'-phosphate
  modified_base 19: mod_base = OTHER; note = 2'-O-methyluridine-3'-phosphate
  modified_base 20: mod_base = OTHER; note = 2'-O-methyluridine-3'-phosphate
  modified_base 21: mod_base = OTHER; note = 2'-O-methyluridine-3'-phosphate ((2S,4R)-1-[29-[[2-(acetylamino)-2-deoxy-beta-D-galactopyra nosyl]oxy]-14,14-bis[[3-[[3-[[5-[[2-(acetylamino)-2-deoxy-b eta-D-galactopyranosyl]oxy]-1-oxopentyl]amino]propyl]amino] -3-oxopropoxy]methyl]-1,12,19,25-tetraoxo-16-oxa-13,20,24-t riazanonacos-1-yl]-4-hydroxy-2-pyrrolidinyl)methyl ester
ttgaattatccggtcgggttt

SEQ ID NO: 1036 - RNA, 21 nt, synthetic construct
  source 1..21: mol_type = other RNA
  modified_base 1: mod_base = OTHER; note = 2'-O-methyladenosine-3'-phosphorothioate
  modified_base 2: mod_base = OTHER; note = 2'-O-methyluridine-3'-phosphorothioate
  modified_base 3: mod_base = OTHER; note = 2'-O-methylcytidine-3'-phosphate
  modified_base 4: mod_base = OTHER; note = 2'-O-methylcytidine-3'-phosphate
  modified_base 5: mod_base = OTHER; note = 2'-O-methylguanosine-3'-phosphate
  modified_base 6: mod_base = OTHER; note = 2'-O-methylguanosine-3'-phosphate
  modified_base 7: mod_base = OTHER; note = 2'-deoxy-2'-fluorouridine-3'-phosphate
  modified_base 8: mod_base = OTHER; note = 2'-O-methylcytidine-3'-phosphate
  modified_base 9: mod_base = OTHER; note = 2'-deoxy-2'-fluoroguanosine-3'-phosphate
  modified_base 10: mod_base = OTHER; note = 2'-deoxy-2'-fluoroguanosine-3'-phosphate
  modified_base 11: mod_base = OTHER; note = 2'-deoxy-2'-fluoroguanosine-3'-phosphate
  modified_base 12: mod_base = OTHER; note = 2'-O-methyluridine-3'-phosphate
  modified_base 13: mod_base = OTHER; note = 2'-O-methyluridine-3'-phosphate
  modified_base 14: mod_base = OTHER; note = 2'-O-methyluridine-3'-phosphate
  modified_base 15: mod_base = OTHER; note = 2'-O-methyluridine-3'-phosphate
  modified_base 16: mod_base = OTHER; note = 2'-O-methyladenosine-3'-phosphate
  modified_base 17: mod_base = OTHER; note = 2'-O-methyluridine-3'-phosphate
  modified_base 18: mod_base = OTHER; note = 2'-O-methyluridine-3'-phosphate
  modified_base 19: mod_base = OTHER; note = 2'-O-methylguanosine-3'-phosphate
  modified_base 20: mod_base = OTHER; note = 2'-O-methyluridine-3'-phosphate
  modified_base 21: mod_base = OTHER; note = 2'-O-methyluridine-3'-phosphate ((2S,4R)-1-[29-[[2-(acetylamino)-2-deoxy-beta-D-galactopyra nosyl]oxy]-14,14-bis[[3-[[3-[[5-[[2-(acetylamino)-2-deoxy-b eta-D-galactopyranosyl]oxy]-1-oxopentyl]amino]propyl]amino] -3-oxopropoxy]methyl]-1,12,19,25-tetraoxo-16-oxa-13,20,24-t riazanonacos-1-yl]-4-hydroxy-2-pyrrolidinyl)methyl ester
atccggtcgggttttattgtt

SEQ ID NO: 1037 - RNA, 21 nt, synthetic construct
  source 1..21: mol_type = other RNA
  modified_base 1: mod_base = OTHER; note = 2'-O-methyluridine-3'-phosphorothioate
  modified_base 2: mod_base = OTHER; note = 2'-O-methylcytidine-3'-phosphorothioate
  modified_base 3: mod_base = OTHER; note = 2'-O-methylguanosine-3'-phosphate
  modified_base 4: mod_base = OTHER; note = 2'-O-methylguanosine-3'-phosphate
  modified_base 5: mod_base = OTHER; note = 2'-O-methylguanosine-3'-phosphate
  modified_base 6: mod_base = OTHER; note = 2'-O-methyluridine-3'-phosphate
  modified_base 7: mod_base = OTHER; note = 2'-deoxy-2'-fluorouridine-3'-phosphate
  modified_base 8: mod_base = OTHER; note = 2'-O-methyluridine-3'-phosphate
  modified_base 9: mod_base = OTHER; note = 2'-deoxy-2'-fluorouridine-3'-phosphate
  modified_base 10: mod_base = OTHER; note = 2'-deoxy-2'-fluoroadenosine-3'-phosphate
  modified_base 11: mod_base = OTHER; note = 2'-deoxy-2'-fluorouridine-3'-phosphate
  modified_base 12: mod_base = OTHER; note = 2'-O-methyluridine-3'-phosphate
  modified_base 13: mod_base = OTHER; note = 2'-O-methylguanosine-3'-phosphate
  modified_base 14: mod_base = OTHER; note = 2'-O-methyluridine-3'-phosphate
  modified_base 15: mod_base = OTHER; note = 2'-O-methyluridine-3'-phosphate
  modified_base 16: mod_base = OTHER; note = 2'-O-methyluridine-3'-phosphate
  modified_base 17: mod_base = OTHER; note = 2'-O-methyladenosine-3'-phosphate
  modified_base 18: mod_base = OTHER; note = 2'-O-methyladenosine-3'-phosphate
  modified_base 19: mod_base = OTHER; note = 2'-O-methyladenosine-3'-phosphate
  modified_base 20: mod_base = OTHER; note = 2'-O-methyladenosine-3'-phosphate
  modified_base 21: mod_base = OTHER; note = 2'-O-methyluridine-3'-phosphate ((2S,4R)-1-[29-[[2-(acetylamino)-2-deoxy-beta-D-galactopyra nosyl]oxy]-14,14-bis[[3-[[3-[[5-[[2-(acetylamino)-2-deoxy-b eta-D-galactopyranosyl]oxy]-1-oxopentyl]amino]propyl]amino] -3-oxopropoxy]methyl]-1,12,19,25-tetraoxo-16-oxa-13,20,24-t riazanonacos-1-yl]-4-hydroxy-2-pyrrolidinyl)methyl ester
tcgggttttattgtttaaaat

SEQ ID NO: 1038 - RNA, 21 nt, synthetic construct
  source 1..21: mol_type = other RNA
  modified_base 1: mod_base = OTHER; note = 2'-O-methyluridine-3'-phosphorothioate
  modified_base 2: mod_base = OTHER; note = 2'-O-methyluridine-3'-phosphorothioate
  modified_base 3: mod_base = OTHER; note = 2'-O-methyluridine-3'-phosphate
  modified_base 4: mod_base = OTHER; note = 2'-O-methyladenosine-3'-phosphate
  modified_base 5: mod_base = OTHER; note = 2'-O-methyladenosine-3'-phosphate
  modified_base 6: mod_base = OTHER; note = 2'-O-methyladenosine-3'-phosphate
  modified_base 7: mod_base = OTHER; note = 2'-deoxy-2'-fluoroadenosine-3'-phosphate
  modified_base 8: mod_base = OTHER; note = 2'-O-methyluridine-3'-phosphate
  modified_base 9: mod_base = OTHER; note = 2'-deoxy-2'-fluorocytidine-3'-phosphate
  modified_base 10: mod_base = OTHER; note = 2'-deoxy-2'-fluoroadenosine-3'-phosphate
  modified_base 11: mod_base = OTHER; note = 2'-deoxy-2'-fluorouridine-3'-phosphate
  modified_base 12: mod_base = OTHER; note = 2'-O-methyluridine-3'-phosphate
  modified_base 13: mod_base = OTHER; note = 2'-O-methyluridine-3'-phosphate
  modified_base 14: mod_base = OTHER; note = 2'-O-methylcytidine-3'-phosphate
  modified_base 15: mod_base = OTHER; note = 2'-O-methyluridine-3'-phosphate
  modified_base 16: mod_base = OTHER; note = 2'-O-methylguanosine-3'-phosphate
  modified_base 17: mod_base = OTHER; note = 2'-O-methylcytidine-3'-phosphate
  modified_base 18: mod_base = OTHER; note = 2'-O-methyladenosine-3'-phosphate
  modified_base 19: mod_base = OTHER; note = 2'-O-methyluridine-3'-phosphate
  modified_base 20: mod_base = OTHER; note = 2'-O-methylcytidine-3'-phosphate
  modified_base 21: mod_base = OTHER; note = 2'-O-methyluridine-3'-phosphate ((2S,4R)-1-[29-[[2-(acetylamino)-2-deoxy-beta-D-galactopyra nosyl]oxy]-14,14-bis[[3-[[3-[[5-[[2-(acetylamino)-2-deoxy-b eta-D-galactopyranosyl]oxy]-1-oxopentyl]amino]propyl]amino] -3-oxopropoxy]methyl]-1,12,19,25-tetraoxo-16-oxa-13,20,24-t riazanonacos-1-yl]-4-hydroxy-2-pyrrolidinyl)methyl ester
tttaaaatcatttctgcatct

SEQ ID NO: 1039 - RNA, 21 nt, synthetic construct
  source 1..21: mol_type = other RNA
  modified_base 1: mod_base = OTHER; note = 2'-O-methyluridine-3'-phosphorothioate
  modified_base 2: mod_base = OTHER; note = 2'-O-methylcytidine-3'-phosphorothioate
  modified_base 3: mod_base = OTHER; note = 2'-O-methyladenosine-3'-phosphate
  modified_base 4: mod_base = OTHER; note = 2'-O-methyluridine-3'-phosphate
  modified_base 5: mod_base = OTHER; note = 2'-O-methyluridine-3'-phosphate
  modified_base 6: mod_base = OTHER; note = 2'-O-methyluridine-3'-phosphate
  modified_base 7: mod_base = OTHER; note = 2'-deoxy-2'-fluorocytidine-3'-phosphate
  modified_base 8: mod_base = OTHER; note = 2'-O-methyluridine-3'-phosphate
  modified_base 9: mod_base = OTHER; note = 2'-deoxy-2'-fluoroguanosine-3'-phosphate
  modified_base 10: mod_base = OTHER; note = 2'-deoxy-2'-fluorocytidine-3'-phosphate
  modified_base 11: mod_base = OTHER; note = 2'-deoxy-2'-fluoroadenosine-3'-phosphate
  modified_base 12: mod_base = OTHER; note = 2'-O-methyluridine-3'-phosphate
  modified_base 13: mod_base = OTHER; note = 2'-O-methylcytidine-3'-phosphate
  modified_base 14: mod_base = OTHER; note = 2'-O-methyladenosine-3'-phosphate
  modified_base 15: mod_base = OTHER; note = 2'-O-methylguanosine-3'-phosphate
  modified_base 16: mod_base = OTHER; note = 2'-O-methylcytidine-3'-phosphate
  modified_base 17: mod_base = OTHER; note = 2'-O-methyluridine-3'-phosphate
  modified_base 18: mod_base = OTHER; note = 2'-O-methylguanosine-3'-phosphate
  modified_base 19: mod_base = OTHER; note = 2'-O-methylcytidine-3'-phosphate
  modified_base 20: mod_base = OTHER; note = 2'-O-methyluridine-3'-phosphate
  modified_base 21: mod_base = OTHER; note = 2'-O-methyluridine-3'-phosphate ((2S,4R)-1-[29-[[2-(acetylamino)-2-deoxy-beta-D-galactopyra nosyl]oxy]-14,14-bis[[3-[[3-[[5-[[2-(acetylamino)-2-deoxy-b eta-D-galactopyranosyl]oxy]-1-oxopentyl]amino]propyl]amino] -3-oxopropoxy]methyl]-1,12,19,25-tetraoxo-16-oxa-13,20,24-t riazanonacos-1-yl]-4-hydroxy-2-pyrrolidinyl)methyl ester
tcatttctgcatcagctgctt

SEQ ID NO: 1040 - RNA, 21 nt, synthetic construct
  source 1..21: mol_type = other RNA
  modified_base 1: mod_base = OTHER; note = 2'-O-methylcytidine-3'-phosphorothioate
  modified_base 2: mod_base = OTHER; note = 2'-O-methyluridine-3'-phosphorothioate
  modified_base 3: mod_base = OTHER; note = 2'-O-methylguanosine-3'-phosphate
  modified_base 4: mod_base = OTHER; note = 2'-O-methylcytidine-3'-phosphate
  modified_base 5: mod_base = OTHER; note = 2'-O-methyladenosine-3'-phosphate
  modified_base 6: mod_base = OTHER; note = 2'-O-methyluridine-3'-phosphate
  modified_base 7: mod_base = OTHER; note = 2'-deoxy-2'-fluorocytidine-3'-phosphate
  modified_base 8: mod_base = OTHER; note = 2'-O-methyladenosine-3'-phosphate
  modified_base 9: mod_base = OTHER; note = 2'-deoxy-2'-fluoroguanosine-3'-phosphate
  modified_base 10: mod_base = OTHER; note = 2'-deoxy-2'-fluorocytidine-3'-phosphate
  modified_base 11: mod_base = OTHER; note = 2'-deoxy-2'-fluorouridine-3'-phosphate
  modified_base 12: mod_base = OTHER; note = 2'-O-methylguanosine-3'-phosphate
  modified_base 13: mod_base = OTHER; note = 2'-O-methylcytidine-3'-phosphate
  modified_base 14: mod_base = OTHER; note = 2'-O-methyluridine-3'-phosphate
  modified_base 15: mod_base = OTHER; note = 2'-O-methylguanosine-3'-phosphate
  modified_base 16: mod_base = OTHER; note = 2'-O-methyladenosine-3'-phosphate
  modified_base 17: mod_base = OTHER; note = 2'-O-methyladenosine-3'-phosphate
  modified_base 18: mod_base = OTHER; note = 2'-O-methyladenosine-3'-phosphate
  modified_base 19: mod_base = OTHER; note = 2'-O-methylcytidine-3'-phosphate
  modified_base 20: mod_base = OTHER; note = 2'-O-methyladenosine-3'-phosphate
  modified_base 21: mod_base = OTHER; note = 2'-O-methyluridine-3'-phosphate ((2S,4R)-1-[29-[[2-(acetylamino)-2-deoxy-beta-D-galactopyra nosyl]oxy]-14,14-bis[[3-[[3-[[5-[[2-(acetylamino)-2-deoxy-b eta-D-galactopyranosyl]oxy]-1-oxopentyl]amino]propyl]amino] -3-oxopropoxy]methyl]-1,12,19,25-tetraoxo-16-oxa-13,20,24-t riazanonacos-1-yl]-4-hydroxy-2-pyrrolidinyl)methyl ester
ctgcatcagctgctgaaacat

SEQ ID NO: 1041 - RNA, 21 nt, synthetic construct
  source 1..21: mol_type = other RNA
  modified_base 1: mod_base = OTHER; note = 2'-O-methylcytidine-3'-phosphorothioate
  modified_base 2: mod_base = OTHER; note = 2'-O-methyladenosine-3'-phosphorothioate
  modified_base 3: mod_base = OTHER; note = 2'-O-methylguanosine-3'-phosphate
  modified_base 4: mod_base = OTHER; note = 2'-O-methylcytidine-3'-phosphate
  modified_base 5: mod_base = OTHER; note = 2'-O-methyluridine-3'-phosphate
  modified_base 6: mod_base = OTHER; note = 2'-O-methylguanosine-3'-phosphate
  modified_base 7: mod_base = OTHER; note = 2'-deoxy-2'-fluorocytidine-3'-phosphate
  modified_base 8: mod_base = OTHER; note = 2'-O-methyluridine-3'-phosphate
  modified_base 9: mod_base = OTHER; note = 2'-deoxy-2'-fluoroguanosine-3'-phosphate
  modified_base 10: mod_base = OTHER; note = 2'-deoxy-2'-fluoroadenosine-3'-phosphate
  modified_base 11: mod_base = OTHER; note = 2'-deoxy-2'-fluoroadenosine-3'-phosphate
  modified_base 12: mod_base = OTHER; note = 2'-O-methyladenosine-3'-phosphate
  modified_base 13: mod_base = OTHER; note = 2'-O-methylcytidine-3'-phosphate
  modified_base 14: mod_base = OTHER; note = 2'-O-methyladenosine-3'-phosphate
  modified_base 15: mod_base = OTHER; note = 2'-O-methyladenosine-3'-phosphate
  modified_base 16: mod_base = OTHER; note = 2'-O-methylcytidine-3'-phosphate
  modified_base 17: mod_base = OTHER; note = 2'-O-methyladenosine-3'-phosphate
  modified_base 18: mod_base = OTHER; note = 2'-O-methyladenosine-3'-phosphate
  modified_base 19: mod_base = OTHER; note = 2'-O-methyladenosine-3'-phosphate
  modified_base 20: mod_base = OTHER; note = 2'-O-methyluridine-3'-phosphate
  modified_base 21: mod_base = OTHER; note = 2'-O-methyluridine-3'-phosphate ((2S,4R)-1-[29-[[2-(acetylamino)-2-deoxy-beta-D-galactopyra nosyl]oxy]-14,14-bis[[3-[[3-[[5-[[2-(acetylamino)-2-deoxy-b eta-D-galactopyranosyl]oxy]-1-oxopentyl]amino]propyl]amino] -3-oxopropoxy]methyl]-1,12,19,25-tetraoxo-16-oxa-13,20,24-t riazanonacos-1-yl]-4-hydroxy-2-pyrrolidinyl)methyl ester
cagctgctgaaacaacaaatt

SEQ ID NO: 1042 - RNA, 21 nt, synthetic construct
  source 1..21: mol_type = other RNA
  modified_base 1: mod_base = OTHER; note = 2'-O-methyladenosine-3'-phosphorothioate
  modified_base 2: mod_base = OTHER; note = 2'-O-methyladenosine-3'-phosphorothioate
  modified_base 3: mod_base = OTHER; note = 2'-O-methyladenosine-3'-phosphate
  modified_base 4: mod_base = OTHER; note = 2'-O-methylcytidine-3'-phosphate
  modified_base 5: mod_base = OTHER; note = 2'-O-methyladenosine-3'-phosphate
  modified_base 6: mod_base = OTHER; note = 2'-O-methyladenosine-3'-phosphate
  modified_base 7: mod_base = OTHER; note = 2'-deoxy-2'-fluorocytidine-3'-phosphate
  modified_base 8: mod_base = OTHER; note = 2'-O-methyladenosine-3'-phosphate
  modified_base 9: mod_base = OTHER; note = 2'-deoxy-2'-fluoroadenosine-3'-phosphate
  modified_base 10: mod_base = OTHER; note = 2'-deoxy-2'-fluoroadenosine-3'-phosphate
  modified_base 11: mod_base = OTHER; note = 2'-deoxy-2'-fluorouridine-3'-phosphate
  modified_base 12: mod_base = OTHER; note = 2'-O-methyladenosine-3'-phosphate
  modified_base 13: mod_base = OTHER; note = 2'-O-methylguanosine-3'-phosphate
  modified_base 14: mod_base = OTHER; note = 2'-O-methylguanosine-3'-phosphate
  modified_base 15: mod_base = OTHER; note = 2'-O-methyladenosine-3'-phosphate
  modified_base 16: mod_base = OTHER; note = 2'-O-methyladenosine-3'-phosphate
  modified_base 17: mod_base = OTHER; note = 2'-O-methyluridine-3'-phosphate
  modified_base 18: mod_base = OTHER; note = 2'-O-methyluridine-3'-phosphate
  modified_base 19: mod_base = OTHER; note = 2'-O-methylguanosine-3'-phosphate
  modified_base 20: mod_base = OTHER; note = 2'-O-methyluridine-3'-phosphate
  modified_base 21: mod_base = OTHER; note = 2'-O-methyluridine-3'-phosphate ((2S,4R)-1-[29-[[2-(acetylamino)-2-deoxy-beta-D-galactopyra nosyl]oxy]-14,14-bis[[3-[[3-[[5-[[2-(acetylamino)-2-deoxy-b eta-D-galactopyranosyl]oxy]-1-oxopentyl]amino]propyl]amino] -3-oxopropoxy]methyl]-1,12,19,25-tetraoxo-16-oxa-13,20,24-t riazanonacos-1-yl]-4-hydroxy-2-pyrrolidinyl)methyl ester
aaacaacaaataggaattgtt

SEQ ID NO: 1043 - RNA, 21 nt, synthetic construct
  source 1..21: mol_type = other RNA
  modified_base 1: mod_base = OTHER; note = 2'-O-methyladenosine-3'-phosphorothioate
  modified_base 2: mod_base = OTHER; note = 2'-O-methylguanosine-3'-phosphorothioate
  modified_base 3: mod_base = OTHER; note = 2'-O-methylguanosine-3'-phosphate
  modified_base 4: mod_base = OTHER; note = 2'-O-methyladenosine-3'-phosphate
  modified_base 5: mod_base = OTHER; note = 2'-O-methyladenosine-3'-phosphate
  modified_base 6: mod_base = OTHER; note = 2'-O-methyluridine-3'-phosphate
  modified_base 7: mod_base = OTHER; note = 2'-deoxy-2'-fluorouridine-3'-phosphate
  modified_base 8: mod_base = OTHER; note = 2'-O-methylguanosine-3'-phosphate
  modified_base 9: mod_base = OTHER; note = 2'-deoxy-2'-fluorouridine-3'-phosphate
  modified_base 10: mod_base = OTHER; note = 2'-deoxy-2'-fluorouridine-3'-phosphate
  modified_base 11: mod_base = OTHER; note = 2'-deoxy-2'-fluorouridine-3'-phosphate
  modified_base 12: mod_base = OTHER; note = 2'-O-methyluridine-3'-phosphate
  modified_base 13: mod_base = OTHER; note = 2'-O-methyluridine-3'-phosphate
  modified_base 14: mod_base = OTHER; note = 2'-O-methyladenosine-3'-phosphate
  modified_base 15: mod_base = OTHER; note = 2'-O-methyluridine-3'-phosphate
  modified_base 16: mod_base = OTHER; note = 2'-O-methylguanosine-3'-phosphate
  modified_base 17: mod_base = OTHER; note = 2'-O-methylguanosine-3'-phosphate
  modified_base 18: mod_base = OTHER; note = 2'-O-methyladenosine-3'-phosphate
  modified_base 19: mod_base = OTHER; note = 2'-O-methylguanosine-3'-phosphate
  modified_base 20: mod_base = OTHER; note = 2'-O-methylguanosine-3'-phosphate
  modified_base 21: mod_base = OTHER; note = 2'-O-methyluridine-3'-phosphate ((2S,4R)-1-[29-[[2-(acetylamino)-2-deoxy-beta-D-galactopyra nosyl]oxy]-14,14-bis[[3-[[3-[[5-[[2-(acetylamino)-2-deoxy-b eta-D-galactopyranosyl]oxy]-1-oxopentyl]amino]propyl]amino] -3-oxopropoxy]methyl]-1,12,19,25-tetraoxo-16-oxa-13,20,24-t riazanonacos-1-yl]-4-hydroxy-2-pyrrolidinyl)methyl ester
aggaattgtttttatggaggt

SEQ ID NO: 1044 - RNA, 21 nt, synthetic construct
  source 1..21: mol_type = other RNA
  modified_base 1: mod_base = OTHER; note = 2'-O-methylguanosine-3'-phosphorothioate
  modified_base 2: mod_base = OTHER; note = 2'-O-methyluridine-3'-phosphorothioate
  modified_base 3: mod_base = OTHER; note = 2'-O-methyluridine-3'-phosphate
  modified_base 4: mod_base = OTHER; note = 2'-O-methyluridine-3'-phosphate
  modified_base 5: mod_base = OTHER; note = 2'-O-methyluridine-3'-phosphate
  modified_base 6: mod_base = OTHER; note = 2'-O-methyluridine-3'-phosphate
  modified_base 7: mod_base = OTHER; note = 2'-deoxy-2'-fluoroadenosine-3'-phosphate
  modified_base 8: mod_base = OTHER; note = 2'-O-methyluridine-3'-phosphate
  modified_base 9: mod_base = OTHER; note = 2'-deoxy-2'-fluoroguanosine-3'-phosphate
  modified_base 10: mod_base = OTHER; note = 2'-deoxy-2'-fluoroguanosine-3'-phosphate
  modified_base 11: mod_base = OTHER; note = 2'-deoxy-2'-fluoroadenosine-3'-phosphate
  modified_base 12: mod_base = OTHER; note = 2'-O-methylguanosine-3'-phosphate
  modified_base 13: mod_base = OTHER; note = 2'-O-methylguanosine-3'-phosphate
  modified_base 14: mod_base = OTHER; note = 2'-O-methylcytidine-3'-phosphate
  modified_base 15: mod_base = OTHER; note = 2'-O-methyluridine-3'-phosphate
  modified_base 16: mod_base = OTHER; note = 2'-O-methyluridine-3'-phosphate
  modified_base 17: mod_base = OTHER; note = 2'-O-methyluridine-3'-phosphate
  modified_base 18: mod_base = OTHER; note = 2'-O-methylguanosine-3'-phosphate
  modified_base 19: mod_base = OTHER; note = 2'-O-methylcytidine-3'-phosphate
  modified_base 20: mod_base = OTHER; note = 2'-O-methyladenosine-3'-phosphate
  modified_base 21: mod_base = OTHER; note = 2'-O-methyluridine-3'-phosphate ((2S,4R)-1-[29-[[2-(acetylamino)-2-deoxy-beta-D-galactopyra nosyl]oxy]-14,14-bis[[3-[[3-[[5-[[2-(acetylamino)-2-deoxy-b eta-D-galactopyranosyl]oxy]-1-oxopentyl]amino]propyl]amino] -3-oxopropoxy]methyl]-1,12,19,25-tetraoxo-16-oxa-13,20,24-t riazanonacos-1-yl]-4-hydroxy-2-pyrrolidinyl)methyl ester
gtttttatggaggctttgcat

SEQ ID NO: 1045 - RNA, 21 nt, synthetic construct
  source 1..21: mol_type = other RNA
  modified_base 1: mod_base = OTHER; note = 2'-O-methyladenosine-3'-phosphorothioate
  modified_base 2: mod_base = OTHER; note = 2'-O-methylguanosine-3'-phosphorothioate
  modified_base 3: mod_base = OTHER; note = 2'-O-methylguanosine-3'-phosphate
  modified_base 4: mod_base = OTHER; note = 2'-O-methylcytidine-3'-phosphate
  modified_base 5: mod_base = OTHER; note = 2'-O-methyluridine-3'-phosphate
  modified_base 6: mod_base = OTHER; note = 2'-O-methyluridine-3'-phosphate
  modified_base 7: mod_base = OTHER; note = 2'-deoxy-2'-fluorouridine-3'-phosphate
  modified_base 8: mod_base = OTHER; note = 2'-O-methylguanosine-3'-phosphate
  modified_base 9: mod_base = OTHER; note = 2'-deoxy-2'-fluorocytidine-3'-phosphate
  modified_base 10: mod_base = OTHER; note = 2'-deoxy-2'-fluoroadenosine-3'-phosphate
  modified_base 11: mod_base = OTHER; note = 2'-deoxy-2'-fluorouridine-3'-phosphate
  modified_base 12: mod_base = OTHER; note = 2'-O-methyladenosine-3'-phosphate
  modified_base 13: mod_base = OTHER; note = 2'-O-methylguanosine-3'-phosphate
  modified_base 14: mod_base = OTHER; note = 2'-O-methyladenosine-3'-phosphate
  modified_base 15: mod_base = OTHER; note = 2'-O-methyluridine-3'-phosphate
  modified_base 16: mod_base = OTHER; note = 2'-O-methyluridine-3'-phosphate
  modified_base 17: mod_base = OTHER; note = 2'-O-methylcytidine-3'-phosphate
  modified_base 18: mod_base = OTHER; note = 2'-O-methylcytidine-3'-phosphate
  modified_base 19: mod_base = OTHER; note = 2'-O-methylcytidine-3'-phosphate
  modified_base 20: mod_base = OTHER; note = 2'-O-methyluridine-3'-phosphate
  modified_base 21: mod_base = OTHER; note = 2'-O-methyluridine-3'-phosphate ((2S,4R)-1-[29-[[2-(acetylamino)-2-deoxy-beta-D-galactopyra nosyl]oxy]-14,14-bis[[3-[[3-[[5-[[2-(acetylamino)-2-deoxy-b eta-D-galactopyranosyl]oxy]-1-oxopentyl]amino]propyl]amino] -3-oxopropoxy]methyl]-1,12,19,25-tetraoxo-16-oxa-13,20,24-t riazanonacos-1-yl]-4-hydroxy-2-pyrrolidinyl)methyl ester
aggctttgcatagattccctt

SEQ ID NO: 1046 - RNA, 21 nt, synthetic construct
  source 1..21: mol_type = other RNA
  modified_base 1: mod_base = OTHER; note = 2'-O-methyluridine-3'-phosphorothioate
  modified_base 2: mod_base = OTHER; note = 2'-O-methylguanosine-3'-phosphorothioate
  modified_base 3: mod_base = OTHER; note = 2'-O-methylcytidine-3'-phosphate
  modified_base 4: mod_base = OTHER; note = 2'-O-methyladenosine-3'-phosphate
  modified_base 5: mod_base = OTHER; note = 2'-O-methyluridine-3'-phosphate
  modified_base 6: mod_base = OTHER; note = 2'-O-methyladenosine-3'-phosphate
  modified_base 7: mod_base = OTHER; note = 2'-deoxy-2'-fluoroguanosine-3'-phosphate
  modified_base 8: mod_base = OTHER; note = 2'-O-methyladenosine-3'-phosphate
  modified_base 9: mod_base = OTHER; note = 2'-deoxy-2'-fluorouridine-3'-phosphate
  modified_base 10: mod_base = OTHER; note = 2'-deoxy-2'-fluorouridine-3'-phosphate
  modified_base 11: mod_base = OTHER; note = 2'-deoxy-2'-fluorocytidine-3'-phosphate
  modified_base 12: mod_base = OTHER; note = 2'-O-methylcytidine-3'-phosphate
  modified_base 13: mod_base = OTHER; note = 2'-O-methylcytidine-3'-phosphate
  modified_base 14: mod_base = OTHER; note = 2'-O-methyluridine-3'-phosphate
  modified_base 15: mod_base = OTHER; note = 2'-O-methylguanosine-3'-phosphate
  modified_base 16: mod_base = OTHER; note = 2'-O-methyladenosine-3'-phosphate
  modified_base 17: mod_base = OTHER; note = 2'-O-methylguanosine-3'-phosphate
  modified_base 18: mod_base = OTHER; note = 2'-O-methylcytidine-3'-phosphate
  modified_base 19: mod_base = OTHER; note = 2'-O-methyladenosine-3'-phosphate
  modified_base 20: mod_base = OTHER; note = 2'-O-methylguanosine-3'-phosphate
  modified_base 21: mod_base = OTHER; note = 2'-O-methyluridine-3'-phosphate ((2S,4R)-1-[29-[[2-(acetylamino)-2-deoxy-beta-D-galactopyra nosyl]oxy]-14,14-bis[[3-[[3-[[5-[[2-(acetylamino)-2-deoxy-b eta-D-galactopyranosyl]oxy]-1-oxopentyl]amino]propyl]amino] -3-oxopropoxy]methyl]-1,12,19,25-tetraoxo-16-oxa-13,20,24-t riazanonacos-1-yl]-4-hydroxy-2-pyrrolidinyl)methyl ester
tgcatagattccctgagcagt

SEQ ID NO: 1047 - RNA, 21 nt, synthetic construct
  source 1..21: mol_type = other RNA
  modified_base 1: mod_base = OTHER; note = 2'-O-methyladenosine-3'-phosphorothioate
  modified_base 2: mod_base = OTHER; note = 2'-O-methyluridine-3'-phosphorothioate
  modified_base 3: mod_base = OTHER; note = 2'-O-methyluridine-3'-phosphate
  modified_base 4: mod_base = OTHER; note = 2'-O-methylcytidine-3'-phosphate
  modified_base 5: mod_base = OTHER; note = 2'-O-methylcytidine-3'-phosphate
  modified_base 6: mod_base = OTHER; note = 2'-O-methylcytidine-3'-phosphate
  modified_base 7: mod_base = OTHER; note = 2'-deoxy-2'-fluorouridine-3'-phosphate
  modified_base 8: mod_base = OTHER; note = 2'-O-methylguanosine-3'-phosphate
  modified_base 9: mod_base = OTHER; note = 2'-deoxy-2'-fluoroadenosine-3'-phosphate
  modified_base 10: mod_base = OTHER; note = 2'-deoxy-2'-fluoroguanosine-3'-phosphate
  modified_base 11: mod_base = OTHER; note = 2'-deoxy-2'-fluorocytidine-3'-phosphate
  modified_base 12: mod_base = OTHER; note = 2'-O-methyladenosine-3'-phosphate
  modified_base 13: mod_base = OTHER; note = 2'-O-methylguanosine-3'-phosphate
  modified_base 14: mod_base = OTHER; note = 2'-O-methylguanosine-3'-phosphate
  modified_base 15: mod_base = OTHER; note = 2'-O-methyladenosine-3'-phosphate
  modified_base 16: mod_base = OTHER; note = 2'-O-methyluridine-3'-phosphate
  modified_base 17: mod_base = OTHER; note = 2'-O-methyluridine-3'-phosphate
  modified_base 18: mod_base = OTHER; note = 2'-O-methyluridine-3'-phosphate
  modified_base 19: mod_base = OTHER; note = 2'-O-methyluridine-3'-phosphate
  modified_base 20: mod_base = OTHER; note = 2'-O-methyladenosine-3'-phosphate
  modified_base 21: mod_base = OTHER; note = 2'-O-methyluridine-3'-phosphate ((2S,4R)-1-[29-[[2-(acetylamino)-2-deoxy-beta-D-galactopyra nosyl]oxy]-14,14-bis[[3-[[3-[[5-[[2-(acetylamino)-2-deoxy-b eta-D-galactopyranosyl]oxy]-1-oxopentyl]amino]propyl]amino] -3-oxopropoxy]methyl]-1,12,19,25-tetraoxo-16-oxa-13,20,24-t riazanonacos-1-yl]-4-hydroxy-2-pyrrolidinyl)methyl ester
attccctgagcaggattttat

SEQ ID NO: 1048 - RNA, 21 nt, synthetic construct
  source 1..21: mol_type = other RNA
  modified_base 1: mod_base = OTHER; note = 2'-O-methyluridine-3'-phosphorothioate
  modified_base 2: mod_base = OTHER; note = 2'-O-methylguanosine-3'-phosphorothioate
  modified_base 3: mod_base = OTHER; note = 2'-O-methyladenosine-3'-phosphate
  modified_base 4: mod_base = OTHER; note = 2'-O-methylguanosine-3'-phosphate
  modified_base 5: mod_base = OTHER; note = 2'-O-methylcytidine-3'-phosphate
  modified_base 6: mod_base = OTHER; note = 2'-O-methyladenosine-3'-phosphate
  modified_base 7: mod_base = OTHER; note = 2'-deoxy-2'-fluoroguanosine-3'-phosphate
  modified_base 8: mod_base = OTHER; note = 2'-O-methylguanosine-3'-phosphate
  modified_base 9: mod_base = OTHER; note = 2'-deoxy-2'-fluoroadenosine-3'-phosphate
  modified_base 10: mod_base = OTHER; note = 2'-deoxy-2'-fluorouridine-3'-phosphate
  modified_base 11: mod_base = OTHER; note = 2'-deoxy-2'-fluorouridine-3'-phosphate
  modified_base 12: mod_base = OTHER; note = 2'-O-methyluridine-3'-phosphate
  modified_base 13: mod_base = OTHER; note = 2'-O-methyluridine-3'-phosphate
  modified_base 14: mod_base = OTHER; note = 2'-O-methyladenosine-3'-phosphate
  modified_base 15: mod_base = OTHER; note = 2'-O-methyladenosine-3'-phosphate
  modified_base 16: mod_base = OTHER; note = 2'-O-methyluridine-3'-phosphate
  modified_base 17: mod_base = OTHER; note = 2'-O-methylcytidine-3'-phosphate
  modified_base 18: mod_base = OTHER; note = 2'-O-methyluridine-3'-phosphate
  modified_base 19: mod_base = OTHER; note = 2'-O-methyluridine-3'-phosphate
  modified_base 20: mod_base = OTHER; note = 2'-O-methyluridine-3'-phosphate
  modified_base 21: mod_base = OTHER; note = 2'-O-methyluridine-3'-phosphate ((2S,4R)-1-[29-[[2-(acetylamino)-2-deoxy-beta-D-galactopyra nosyl]oxy]-14,14-bis[[3-[[3-[[5-[[2-(acetylamino)-2-deoxy-b eta-D-galactopyranosyl]oxy]-1-oxopentyl]amino]propyl]amino] -3-oxopropoxy]methyl]-1,12,19,25-tetraoxo-16-oxa-13,20,24-t riazanonacos-1-yl]-4-hydroxy-2-pyrrolidinyl)methyl ester
tgagcaggattttaatctttt

SEQ ID NO: 1049 - RNA, 21 nt, synthetic construct
  source 1..21: mol_type = other RNA
  modified_base 1: mod_base = OTHER; note = 2'-O-methyluridine-3'-phosphorothioate
  modified_base 2: mod_base = OTHER; note = 2'-O-methyladenosine-3'-phosphorothioate
  modified_base 3: mod_base = OTHER; note = 2'-O-methyladenosine-3'-phosphate
  modified_base 4: mod_base = OTHER; note = 2'-O-methyluridine-3'-phosphate
  modified_base 5: mod_base = OTHER; note = 2'-O-methylcytidine-3'-phosphate
  modified_base 6: mod_base = OTHER; note = 2'-O-methyluridine-3'-phosphate
  modified_base 7: mod_base = OTHER; note = 2'-deoxy-2'-fluorouridine-3'-phosphate
  modified_base 8: mod_base = OTHER; note = 2'-O-methyluridine-3'-phosphate
  modified_base 9: mod_base = OTHER; note = 2'-deoxy-2'-fluorouridine-3'-phosphate
  modified_base 10: mod_base = OTHER; note = 2'-deoxy-2'-fluorouridine-3'-phosphate
  modified_base 11: mod_base = OTHER; note = 2'-deoxy-2'-fluorocytidine-3'-phosphate
  modified_base 12: mod_base = OTHER; note = 2'-O-methyluridine-3'-phosphate
  modified_base 13: mod_base = OTHER; note = 2'-O-methyladenosine-3'-phosphate
  modified_base 14: mod_base = OTHER; note = 2'-O-methyladenosine-3'-phosphate
  modified_base 15: mod_base = OTHER; note = 2'-O-methylcytidine-3'-phosphate
  modified_base 16: mod_base = OTHER; note = 2'-O-methyluridine-3'-phosphate
  modified_base 17: mod_base = OTHER; note = 2'-O-methylguanosine-3'-phosphate
  modified_base 18: mod_base = OTHER; note = 2'-O-methylguanosine-3'-phosphate
  modified_base 19: mod_base = OTHER; note = 2'-O-methyladenosine-3'-phosphate
  modified_base 20: mod_base = OTHER; note = 2'-O-methylcytidine-3'-phosphate
  modified_base 21: mod_base = OTHER; note = 2'-O-methyluridine-3'-phosphate ((2S,4R)-1-[29-[[2-(acetylamino)-2-deoxy-beta-D-galactopyra nosyl]oxy]-14,14-bis[[3-[[3-[[5-[[2-(acetylamino)-2-deoxy-b eta-D-galactopyranosyl]oxy]-1-oxopentyl]amino]propyl]amino] -3-oxopropoxy]methyl]-1,12,19,25-tetraoxo-16-oxa-13,20,24-t riazanonacos-1-yl]-4-hydroxy-2-pyrrolidinyl)methyl ester
taatctttttctaactggact

SEQ ID NO: 1050 - RNA, 21 nt, synthetic construct
  source 1..21: mol_type = other RNA
  modified_base 1: mod_base = OTHER; note = 2'-O-methyluridine-3'-phosphorothioate
  modified_base 2: mod_base = OTHER; note = 2'-O-methylcytidine-3'-phosphorothioate
  modified_base 3: mod_base = OTHER; note = 2'-O-methyluridine-3'-phosphate
  modified_base 4: mod_base = OTHER; note = 2'-O-methyladenosine-3'-phosphate
  modified_base 5: mod_base = OTHER; note = 2'-O-methyladenosine-3'-phosphate
  modified_base 6: mod_base = OTHER; note = 2'-O-methylcytidine-3'-phosphate
  modified_base 7: mod_base = OTHER; note = 2'-deoxy-2'-fluorouridine-3'-phosphate
  modified_base 8: mod_base = OTHER; note = 2'-O-methylguanosine-3'-phosphate
  modified_base 9: mod_base = OTHER; note = 2'-deoxy-2'-fluoroguanosine-3'-phosphate
  modified_base 10: mod_base = OTHER; note = 2'-deoxy-2'-fluoroadenosine-3'-phosphate
  modified_base 11: mod_base = OTHER; note = 2'-deoxy-2'-fluorocytidine-3'-phosphate
  modified_base 12: mod_base = OTHER; note = 2'-O-methyluridine-3'-phosphate
  modified_base 13: mod_base = OTHER; note = 2'-O-methylguanosine-3'-phosphate
  modified_base 14: mod_base = OTHER; note = 2'-O-methylguanosine-3'-phosphate
  modified_base 15: mod_base = OTHER; note = 2'-O-methyluridine-3'-phosphate
  modified_base 16: mod_base = OTHER; note = 2'-O-methyluridine-3'-phosphate
  modified_base 17: mod_base = OTHER; note = 2'-O-methylcytidine-3'-phosphate
  modified_base 18: mod_base = OTHER; note = 2'-O-methyladenosine-3'-phosphate
  modified_base 19: mod_base = OTHER; note = 2'-O-methyladenosine-3'-phosphate
  modified_base 20: mod_base = OTHER; note = 2'-O-methyladenosine-3'-phosphate
  modified_base 21: mod_base = OTHER; note = 2'-O-methyluridine-3'-phosphate ((2S,4R)-1-[29-[[2-(acetylamino)-2-deoxy-beta-D-galactopyra nosyl]oxy]-14,14-bis[[3-[[3-[[5-[[2-(acetylamino)-2-deoxy-b eta-D-galactopyranosyl]oxy]-1-oxopentyl]amino]propyl]amino] -3-oxopropoxy]methyl]-1,12,19,25-tetraoxo-16-oxa-13,20,24-t riazanonacos-1-yl]-4-hydroxy-2-pyrrolidinyl)methyl ester
tctaactggactggttcaaat

SEQ ID NO: 1051 - RNA, 21 nt, synthetic construct
  source 1..21: mol_type = other RNA
  modified_base 1: mod_base = OTHER; note = 2'-O-methylguanosine-3'-phosphorothioate
  modified_base 2: mod_base = OTHER; note = 2'-O-methylguanosine-3'-phosphorothioate
  modified_base 3: mod_base = OTHER; note = 2'-O-methyladenosine-3'-phosphate
  modified_base 4: mod_base = OTHER; note = 2'-O-methylcytidine-3'-phosphate
  modified_base 5: mod_base = OTHER; note = 2'-O-methyluridine-3'-phosphate
  modified_base 6: mod_base = OTHER; note = 2'-O-methylguanosine-3'-phosphate
  modified_base 7: mod_base = OTHER; note = 2'-deoxy-2'-fluoroguanosine-3'-phosphate
  modified_base 8: mod_base = OTHER; note = 2'-O-methyluridine-3'-phosphate
  modified_base 9: mod_base = OTHER; note = 2'-deoxy-2'-fluorouridine-3'-phosphate
  modified_base 10: mod_base = OTHER; note = 2'-deoxy-2'-fluorocytidine-3'-phosphate
  modified_base 11: mod_base = OTHER; note = 2'-deoxy-2'-fluoroadenosine-3'-phosphate
  modified_base 12: mod_base = OTHER; note = 2'-O-methyladenosine-3'-phosphate
  modified_base 13: mod_base = OTHER; note = 2'-O-methyladenosine-3'-phosphate
  modified_base 14: mod_base = OTHER; note = 2'-O-methyluridine-3'-phosphate
  modified_base 15: mod_base = OTHER; note = 2'-O-methylguanosine-3'-phosphate
  modified_base 16: mod_base = OTHER; note = 2'-O-methyluridine-3'-phosphate
  modified_base 17: mod_base = OTHER; note = 2'-O-methyluridine-3'-phosphate
  modified_base 18: mod_base = OTHER; note = 2'-O-methylguanosine-3'-phosphate
  modified_base 19: mod_base = OTHER; note = 2'-O-methyluridine-3'-phosphate
  modified_base 20: mod_base = OTHER; note = 2'-O-methyluridine-3'-phosphate
  modified_base 21: mod_base = OTHER; note = 2'-O-methyluridine-3'-phosphate ((2S,4R)-1-[29-[[2-(acetylamino)-2-deoxy-beta-D-galactopyra nosyl]oxy]-14,14-bis[[3-[[3-[[5-[[2-(acetylamino)-2-deoxy-b eta-D-galactopyranosyl]oxy]-1-oxopentyl]amino]propyl]amino] -3-oxopropoxy]methyl]-1,12,19,25-tetraoxo-16-oxa-13,20,24-t riazanonacos-1-yl]-4-hydroxy-2-pyrrolidinyl)methyl ester
ggactggttcaaatgttgttt

SEQ ID NO: 1052 - RNA, 21 nt, synthetic construct
  source 1..21: mol_type = other RNA
  modified_base 1: mod_base = OTHER; note = 2'-O-methyladenosine-3'-phosphorothioate
  modified_base 2: mod_base = OTHER; note = 2'-O-methyladenosine-3'-phosphorothioate
  modified_base 3: mod_base = OTHER; note = 2'-O-methyladenosine-3'-phosphate
  modified_base 4: mod_base = OTHER; note = 2'-O-methyluridine-3'-phosphate
  modified_base 5: mod_base = OTHER; note = 2'-O-methylguanosine-3'-phosphate
  modified_base 6: mod_base = OTHER; note = 2'-O-methyluridine-3'-phosphate
  modified_base 7: mod_base = OTHER; note = 2'-deoxy-2'-fluorouridine-3'-phosphate
  modified_base 8: mod_base = OTHER; note = 2'-O-methylguanosine-3'-phosphate
  modified_base 9: mod_base = OTHER; note = 2'-deoxy-2'-fluorouridine-3'-phosphate
  modified_base 10: mod_base = OTHER; note = 2'-deoxy-2'-fluorouridine-3'-phosphate
  modified_base 11: mod_base = OTHER; note = 2'-deoxy-2'-fluorocytidine-3'-phosphate
  modified_base 12: mod_base = OTHER; note = 2'-O-methyluridine-3'-phosphate
  modified_base 13: mod_base = OTHER; note = 2'-O-methylcytidine-3'-phosphate
  modified_base 14: mod_base = OTHER; note = 2'-O-methyluridine-3'-phosphate
  modified_base 15: mod_base = OTHER; note = 2'-O-methyluridine-3'-phosphate
  modified_base 16: mod_base = OTHER; note = 2'-O-methylcytidine-3'-phosphate
  modified_base 17: mod_base = OTHER; note = 2'-O-methyluridine-3'-phosphate
  modified_base 18: mod_base = OTHER; note = 2'-O-methyluridine-3'-phosphate
  modified_base 19: mod_base = OTHER; note = 2'-O-methyluridine-3'-phosphate
  modified_base 20: mod_base = OTHER; note = 2'-O-methyladenosine-3'-phosphate
  modified_base 21: mod_base = OTHER; note = 2'-O-methyluridine-3'-phosphate ((2S,4R)-1-[29-[[2-(acetylamino)-2-deoxy-beta-D-galactopyra nosyl]oxy]-14,14-bis[[3-[[3-[[5-[[2-(acetylamino)-2-deoxy-b eta-D-galactopyranosyl]oxy]-1-oxopentyl]amino]propyl]amino] -3-oxopropoxy]methyl]-1,12,19,25-tetraoxo-16-oxa-13,20,24-t riazanonacos-1-yl]-4-hydroxy-2-pyrrolidinyl)methyl ester
aaatgttgttctcttctttat

SEQ ID NO: 1053 - RNA, 21 nt, synthetic construct
  source 1..21: mol_type = other RNA
  modified_base 1: mod_base = OTHER; note = 2'-O-methyluridine-3'-phosphorothioate
  modified_base 2: mod_base = OTHER; note = 2'-O-methyluridine-3'-phosphorothioate
  modified_base 3: mod_base = OTHER; note = 2'-O-methylcytidine-3'-phosphate
  modified_base 4: mod_base = OTHER; note = 2'-O-methyluridine-3'-phosphate
  modified_base 5: mod_base = OTHER; note = 2'-O-methylcytidine-3'-phosphate
  modified_base 6: mod_base = OTHER; note = 2'-O-methyluridine-3'-phosphate
  modified_base 7: mod_base = OTHER; note = 2'-deoxy-2'-fluorouridine-3'-phosphate
  modified_base 8: mod_base = OTHER; note = 2'-O-methylcytidine-3'-phosphate
  modified_base 9: mod_base = OTHER; note = 2'-deoxy-2'-fluorouridine-3'-phosphate
  modified_base 10: mod_base = OTHER; note = 2'-deoxy-2'-fluorouridine-3'-phosphate
  modified_base 11: mod_base = OTHER; note = 2'-deoxy-2'-fluorouridine-3'-phosphate
  modified_base 12: mod_base = OTHER; note = 2'-O-methyladenosine-3'-phosphate
  modified_base 13: mod_base = OTHER; note = 2'-O-methyladenosine-3'-phosphate
  modified_base 14: mod_base = OTHER; note = 2'-O-methyladenosine-3'-phosphate
  modified_base 15: mod_base = OTHER; note = 2'-O-methylguanosine-3'-phosphate
  modified_base 16: mod_base = OTHER; note = 2'-O-methylguanosine-3'-phosphate
  modified_base 17: mod_base = OTHER; note = 2'-O-methylguanosine-3'-phosphate
  modified_base 18: mod_base = OTHER; note = 2'-O-methyladenosine-3'-phosphate
  modified_base 19: mod_base = OTHER; note = 2'-O-methyluridine-3'-phosphate
  modified_base 20: mod_base = OTHER; note = 2'-O-methylguanosine-3'-phosphate
  modified_base 21: mod_base = OTHER; note = 2'-O-methyluridine-3'-phosphate ((2S,4R)-1-[29-[[2-(acetylamino)-2-deoxy-beta-D-galactopyra nosyl]oxy]-14,14-bis[[3-[[3-[[5-[[2-(acetylamino)-2-deoxy-b eta-D-galactopyranosyl]oxy]-1-oxopentyl]amino]propyl]amino] -3-oxopropoxy]methyl]-1,12,19,25-tetraoxo-16-oxa-13,20,24-t riazanonacos-1-yl]-4-hydroxy-2-pyrrolidinyl)methyl ester
ttctcttctttaaagggatgt

SEQ ID NO: 1054 - RNA, 21 nt, synthetic construct
  source 1..21: mol_type = other RNA
  modified_base 1: mod_base = OTHER; note = 2'-O-methylcytidine-3'-phosphorothioate
  modified_base 2: mod_base = OTHER; note = 2'-O-methyluridine-3'-phosphorothioate
  modified_base 3: mod_base = OTHER; note = 2'-O-methyluridine-3'-phosphate
  modified_base 4: mod_base = OTHER; note = 2'-O-methyluridine-3'-phosphate
  modified_base 5: mod_base = OTHER; note = 2'-O-methyladenosine-3'-phosphate
  modified_base 6: mod_base = OTHER; note = 2'-O-methyladenosine-3'-phosphate
  modified_base 7: mod_base = OTHER; note = 2'-deoxy-2'-fluoroadenosine-3'-phosphate
  modified_base 8: mod_base = OTHER; note = 2'-O-methylguanosine-3'-phosphate
  modified_base 9: mod_base = OTHER; note = 2'-deoxy-2'-fluoroguanosine-3'-phosphate
  modified_base 10: mod_base = OTHER; note = 2'-deoxy-2'-fluoroguanosine-3'-phosphate
  modified_base 11: mod_base = OTHER; note = 2'-deoxy-2'-fluoroadenosine-3'-phosphate
  modified_base 12: mod_base = OTHER; note = 2'-O-methyluridine-3'-phosphate
  modified_base 13: mod_base = OTHER; note = 2'-O-methylguanosine-3'-phosphate
  modified_base 14: mod_base = OTHER; note = 2'-O-methylguanosine-3'-phosphate
  modified_base 15: mod_base = OTHER; note = 2'-O-methylcytidine-3'-phosphate
  modified_base 16: mod_base = OTHER; note = 2'-O-methyladenosine-3'-phosphate
  modified_base 17: mod_base = OTHER; note = 2'-O-methyladenosine-3'-phosphate
  modified_base 18: mod_base = OTHER; note = 2'-O-methylguanosine-3'-phosphate
  modified_base 19: mod_base = OTHER; note = 2'-O-methyladenosine-3'-phosphate
  modified_base 20: mod_base = OTHER; note = 2'-O-methyluridine-3'-phosphate
  modified_base 21: mod_base = OTHER; note = 2'-O-methyluridine-3'-phosphate ((2S,4R)-1-[29-[[2-(acetylamino)-2-deoxy-beta-D-galactopyra nosyl]oxy]-14,14-bis[[3-[[3-[[5-[[2-(acetylamino)-2-deoxy-b eta-D-galactopyranosyl]oxy]-1-oxopentyl]amino]propyl]amino] -3-oxopropoxy]methyl]-1,12,19,25-tetraoxo-16-oxa-13,20,24-t riazanonacos-1-yl]-4-hydroxy-2-pyrrolidinyl)methyl ester
ctttaaagggatggcaagatt

SEQ ID NO: 1055 - RNA, 21 nt, synthetic construct
  source 1..21: mol_type = other RNA
  modified_base 1: mod_base = OTHER; note = 2'-O-methylguanosine-3'-phosphorothioate
  modified_base 2: mod_base = OTHER; note = 2'-O-methylguanosine-3'-phosphorothioate
  modified_base 3: mod_base = OTHER; note = 2'-O-methylcytidine-3'-phosphate
  modified_base 4: mod_base = OTHER; note = 2'-O-methyladenosine-3'-phosphate
  modified_base 5: mod_base = OTHER; note = 2'-O-methyladenosine-3'-phosphate
  modified_base 6: mod_base = OTHER; note = 2'-O-methylguanosine-3'-phosphate
  modified_base 7: mod_base = OTHER; note = 2'-deoxy-2'-fluoroadenosine-3'-phosphate
  modified_base 8: mod_base = OTHER; note = 2'-O-methyluridine-3'-phosphate
  modified_base 9: mod_base = OTHER; note = 2'-deoxy-2'-fluoroguanosine-3'-phosphate
  modified_base 10: mod_base = OTHER; note = 2'-deoxy-2'-fluorouridine-3'-phosphate
  modified_base 11: mod_base = OTHER; note = 2'-deoxy-2'-fluoroguanosine-3'-phosphate
  modified_base 12: mod_base = OTHER; note = 2'-O-methylguanosine-3'-phosphate
  modified_base 13: mod_base = OTHER; note = 2'-O-methylguanosine-3'-phosphate
  modified_base 14: mod_base = OTHER; note = 2'-O-methylcytidine-3'-phosphate
  modified_base 15: mod_base = OTHER; note = 2'-O-methyladenosine-3'-phosphate
  modified_base 16: mod_base = OTHER; note = 2'-O-methylguanosine-3'-phosphate
  modified_base 17: mod_base = OTHER; note = 2'-O-methyluridine-3'-phosphate
  modified_base 18: mod_base = OTHER; note = 2'-O-methylguanosine-3'-phosphate
  modified_base 19: mod_base = OTHER; note = 2'-O-methyladenosine-3'-phosphate
  modified_base 20: mod_base = OTHER; note = 2'-O-methyluridine-3'-phosphate
  modified_base 21: mod_base = OTHER; note = 2'-O-methyluridine-3'-phosphate ((2S,4R)-1-[29-[[2-(acetylamino)-2-deoxy-beta-D-galactopyra nosyl]oxy]-14,14-bis[[3-[[3-[[5-[[2-(acetylamino)-2-deoxy-b eta-D-galactopyranosyl]oxy]-1-oxopentyl]amino]propyl]amino] -3-oxopropoxy]methyl]-1,12,19,25-tetraoxo-16-oxa-13,20,24-t riazanonacos-1-yl]-4-hydroxy-2-pyrrolidinyl)methyl ester
ggcaagatgtgggcagtgatt

SEQ ID NO: 1056 - RNA, 21 nt, synthetic construct
  source 1..21: mol_type = other RNA
  modified_base 1: mod_base = OTHER; note = 2'-O-methyluridine-3'-phosphorothioate
  modified_base 2: mod_base = OTHER; note = 2'-O-methylguanosine-3'-phosphorothioate
  modified_base 3: mod_base = OTHER; note = 2'-O-methylguanosine-3'-phosphate
  modified_base 4: mod_base = OTHER; note = 2'-O-methylguanosine-3'-phosphate
  modified_base 5: mod_base = OTHER; note = 2'-O-methylcytidine-3'-phosphate
  modified_base 6: mod_base = OTHER; note = 2'-O-methyladenosine-3'-phosphate
  modified_base 7: mod_base = OTHER; note = 2'-deoxy-2'-fluoroguanosine-3'-phosphate
  modified_base 8: mod_base = OTHER; note = 2'-O-methyluridine-3'-phosphate
  modified_base 9: mod_base = OTHER; note = 2'-deoxy-2'-fluoroguanosine-3'-phosphate
  modified_base 10: mod_base = OTHER; note = 2'-deoxy-2'-fluoroadenosine-3'-phosphate
  modified_base 11: mod_base = OTHER; note = 2'-deoxy-2'-fluorouridine-3'-phosphate
  modified_base 12: mod_base = OTHER; note = 2'-O-methylguanosine-3'-phosphate
  modified_base 13: mod_base = OTHER; note = 2'-O-methyluridine-3'-phosphate
  modified_base 14: mod_base = OTHER; note = 2'-O-methylcytidine-3'-phosphate
  modified_base 15: mod_base = OTHER; note = 2'-O-methyladenosine-3'-phosphate
  modified_base 16: mod_base = OTHER; note = 2'-O-methylcytidine-3'-phosphate
  modified_base 17: mod_base = OTHER; note = 2'-O-methyluridine-3'-phosphate
  modified_base 18: mod_base = OTHER; note = 2'-O-methyladenosine-3'-phosphate
  modified_base 19: mod_base = OTHER; note = 2'-O-methylguanosine-3'-phosphate
  modified_base 20: mod_base = OTHER; note = 2'-O-methylguanosine-3'-phosphate
  modified_base 21: mod_base = OTHER; note = 2'-O-methyluridine-3'-phosphate ((2S,4R)-1-[29-[[2-(acetylamino)-2-deoxy-beta-D-galactopyra nosyl]oxy]-14,14-bis[[3-[[3-[[5-[[2-(acetylamino)-2-deoxy-b eta-D-galactopyranosyl]oxy]-1-oxopentyl]amino]propyl]amino] -3-oxopropoxy]methyl]-1,12,19,25-tetraoxo-16-oxa-13,20,24-t riazanonacos-1-yl]-4-hydroxy-2-pyrrolidinyl)methyl ester
tgggcagtgatgtcactaggt

SEQ ID NO: 1057 - RNA, 21 nt, synthetic construct
  source 1..21: mol_type = other RNA
  modified_base 1: mod_base = OTHER; note = 2'-O-methylguanosine-3'-phosphorothioate
  modified_base 2: mod_base = OTHER; note = 2'-O-methylguanosine-3'-phosphorothioate
  modified_base 3: mod_base = OTHER; note = 2'-O-methylguanosine-3'-phosphate
  modified_base 4: mod_base = OTHER; note = 2'-O-methyladenosine-3'-phosphate
  modified_base 5: mod_base = OTHER; note = 2'-O-methylcytidine-3'-phosphate
  modified_base 6: mod_base = OTHER; note = 2'-O-methyladenosine-3'-phosphate
  modified_base 7: mod_base = OTHER; note = 2'-deoxy-2'-fluoroguanosine-3'-phosphate
  modified_base 8: mod_base = OTHER; note = 2'-O-methylguanosine-3'-phosphate
  modified_base 9: mod_base = OTHER; note = 2'-deoxy-2'-fluoroadenosine-3'-phosphate
  modified_base 10: mod_base = OTHER; note = 2'-deoxy-2'-fluorouridine-3'-phosphate
  modified_base 11: mod_base = OTHER; note = 2'-deoxy-2'-fluoroadenosine-3'-phosphate
  modified_base 12: mod_base = OTHER; note = 2'-O-methyladenosine-3'-phosphate
  modified_base 13: mod_base = OTHER; note = 2'-O-methylguanosine-3'-phosphate
  modified_base 14: mod_base = OTHER; note = 2'-O-methyladenosine-3'-phosphate
  modified_base 15: mod_base = OTHER; note = 2'-O-methylguanosine-3'-phosphate
  modified_base 16: mod_base = OTHER; note = 2'-O-methylguanosine-3'-phosphate
  modified_base 17: mod_base = OTHER; note = 2'-O-methylguanosine-3'-phosphate
  modified_base 18: mod_base = OTHER; note = 2'-O-methyladenosine-3'-phosphate
  modified_base 19: mod_base = OTHER; note = 2'-O-methyluridine-3'-phosphate
  modified_base 20: mod_base = OTHER; note = 2'-O-methyluridine-3'-phosphate
  modified_base 21: mod_base = OTHER; note = 2'-O-methyluridine-3'-phosphate ((2S,4R)-1-[29-[[2-(acetylamino)-2-deoxy-beta-D-galactopyra nosyl]oxy]-14,14-bis[[3-[[3-[[5-[[2-(acetylamino)-2-deoxy-b eta-D-galactopyranosyl]oxy]-1-oxopentyl]amino]propyl]amino] -3-oxopropoxy]methyl]-1,12,19,25-tetraoxo-16-oxa-13,20,24-t riazanonacos-1-yl]-4-hydroxy-2-pyrrolidinyl)methyl ester
gggacaggataagagggattt

SEQ ID NO: 1058 - RNA, 21 nt, synthetic construct
  source 1..21: mol_type = other RNA
  modified_base 1: mod_base = OTHER; note = 2'-O-methylguanosine-3'-phosphorothioate
  modified_base 2: mod_base = OTHER; note = 2'-O-methylguanosine-3'-phosphorothioate
  modified_base 3: mod_base = OTHER; note = 2'-O-methyladenosine-3'-phosphate
  modified_base 4: mod_base = OTHER; note = 2'-O-methyluridine-3'-phosphate
  modified_base 5: mod_base = OTHER; note = 2'-O-methyladenosine-3'-phosphate
  modified_base 6: mod_base = OTHER; note = 2'-O-methyladenosine-3'-phosphate
  modified_base 7: mod_base = OTHER; note = 2'-deoxy-2'-fluoroguanosine-3'-phosphate
  modified_base 8: mod_base = OTHER; note = 2'-O-methyladenosine-3'-phosphate
  modified_base 9: mod_base = OTHER; note = 2'-deoxy-2'-fluoroguanosine-3'-phosphate
  modified_base 10: mod_base = OTHER; note = 2'-deoxy-2'-fluoroguanosine-3'-phosphate
  modified_base 11: mod_base = OTHER; note = 2'-deoxy-2'-fluoroguanosine-3'-phosphate
  modified_base 12: mod_base = OTHER; note = 2'-O-methyladenosine-3'-phosphate
  modified_base 13: mod_base = OTHER; note = 2'-O-methyluridine-3'-phosphate
  modified_base 14: mod_base = OTHER; note = 2'-O-methyluridine-3'-phosphate
  modified_base 15: mod_base = OTHER; note = 2'-O-methyladenosine-3'-phosphate
  modified_base 16: mod_base = OTHER; note = 2'-O-methylguanosine-3'-phosphate
  modified_base 17: mod_base = OTHER; note = 2'-O-methylguanosine-3'-phosphate
  modified_base 18: mod_base = OTHER; note = 2'-O-methylguanosine-3'-phosphate
  modified_base 19: mod_base = OTHER; note = 2'-O-methyladenosine-3'-phosphate
  modified_base 20: mod_base = OTHER; note = 2'-O-methylguanosine-3'-phosphate
  modified_base 21: mod_base = OTHER; note = 2'-O-methyluridine-3'-phosphate ((2S,4R)-1-[29-[[2-(acetylamino)-2-deoxy-beta-D-galactopyra nosyl]oxy]-14,14-bis[[3-[[3-[[5-[[2-(acetylamino)-2-deoxy-b eta-D-galactopyranosyl]oxy]-1-oxopentyl]amino]propyl]amino] -3-oxopropoxy]methyl]-1,12,19,25-tetraoxo-16-oxa-13,20,24-t riazanonacos-1-yl]-4-hydroxy-2-pyrrolidinyl)methyl ester
ggataagagggattagggagt

SEQ ID NO: 1059 - RNA, 21 nt, synthetic construct
  source 1..21: mol_type = other RNA
  modified_base 1: mod_base = OTHER; note = 2'-O-methyladenosine-3'-phosphorothioate
  modified_base 2: mod_base = OTHER; note = 2'-O-methylguanosine-3'-phosphorothioate
  modified_base 3: mod_base = OTHER; note = 2'-O-methylguanosine-3'-phosphate
  modified_base 4: mod_base = OTHER; note = 2'-O-methylguanosine-3'-phosphate
  modified_base 5: mod_base = OTHER; note = 2'-O-methyladenosine-3'-phosphate
  modified_base 6: mod_base = OTHER; note = 2'-O-methyluridine-3'-phosphate
  modified_base 7: mod_base = OTHER; note = 2'-deoxy-2'-fluorouridine-3'-phosphate
  modified_base 8: mod_base = OTHER; note = 2'-O-methyladenosine-3'-phosphate
  modified_base 9: mod_base = OTHER; note = 2'-deoxy-2'-fluoroguanosine-3'-phosphate
  modified_base 10: mod_base = OTHER; note = 2'-deoxy-2'-fluoroguanosine-3'-phosphate
  modified_base 11: mod_base = OTHER; note = 2'-deoxy-2'-fluoroguanosine-3'-phosphate
  modified_base 12: mod_base = OTHER; note = 2'-O-methyladenosine-3'-phosphate
  modified_base 13: mod_base = OTHER; note = 2'-O-methylguanosine-3'-phosphate
  modified_base 14: mod_base = OTHER; note = 2'-O-methyladenosine-3'-phosphate
  modified_base 15: mod_base = OTHER; note = 2'-O-methylguanosine-3'-phosphate
  modified_base 16: mod_base = OTHER; note = 2'-O-methyladenosine-3'-phosphate
  modified_base 17: mod_base = OTHER; note = 2'-O-methyladenosine-3'-phosphate
  modified_base 18: mod_base = OTHER; note = 2'-O-methylguanosine-3'-phosphate
  modified_base 19: mod_base = OTHER; note = 2'-O-methyladenosine-3'-phosphate
  modified_base 20: mod_base = OTHER; note = 2'-O-methyluridine-3'-phosphate
  modified_base 21: mod_base = OTHER; note = 2'-O-methyluridine-3'-phosphate ((2S,4R)-1-[29-[[2-(acetylamino)-2-deoxy-beta-D-galactopyra nosyl]oxy]-14,14-bis[[3-[[3-[[5-[[2-(acetylamino)-2-deoxy-b eta-D-galactopyranosyl]oxy]-1-oxopentyl]amino]propyl]amino] -3-oxopropoxy]methyl]-1,12,19,25-tetraoxo-16-oxa-13,20,24-t riazanonacos-1-yl]-4-hydroxy-2-pyrrolidinyl)methyl ester
agggattagggagagaagatt

SEQ ID NO: 1060 - RNA, 21 nt, synthetic construct
  source 1..21: mol_type = other RNA
  modified_base 1: mod_base = OTHER; note = 2'-O-methyluridine-3'-phosphorothioate
  modified_base 2: mod_base = OTHER; note = 2'-O-methyladenosine-3'-phosphorothioate
  modified_base 3: mod_base = OTHER; note = 2'-O-methylguanosine-3'-phosphate
  modified_base 4: mod_base = OTHER; note = 2'-O-methylguanosine-3'-phosphate
  modified_base 5: mod_base = OTHER; note = 2'-O-methylguanosine-3'-phosphate
  modified_base 6: mod_base = OTHER; note = 2'-O-methyladenosine-3'-phosphate
  modified_base 7: mod_base = OTHER; note = 2'-deoxy-2'-fluoroguanosine-3'-phosphate
  modified_base 8: mod_base = OTHER; note = 2'-O-methyladenosine-3'-phosphate
  modified_base 9: mod_base = OTHER; note = 2'-deoxy-2'-fluoroguanosine-3'-phosphate
  modified_base 10: mod_base = OTHER; note = 2'-deoxy-2'-fluoroadenosine-3'-phosphate
  modified_base 11: mod_base = OTHER; note = 2'-deoxy-2'-fluoroadenosine-3'-phosphate
  modified_base 12: mod_base = OTHER; note = 2'-O-methylguanosine-3'-phosphate
  modified_base 13: mod_base = OTHER; note = 2'-O-methyladenosine-3'-phosphate
  modified_base 14: mod_base = OTHER; note = 2'-O-methyluridine-3'-phosphate
  modified_base 15: mod_base = OTHER; note = 2'-O-methyladenosine-3'-phosphate
  modified_base 16: mod_base = OTHER; note = 2'-O-methylguanosine-3'-phosphate
  modified_base 17: mod_base = OTHER; note = 2'-O-methylcytidine-3'-phosphate
  modified_base 18: mod_base = OTHER; note = 2'-O-methyladenosine-3'-phosphate
  modified_base 19: mod_base = OTHER; note = 2'-O-methylguanosine-3'-phosphate
  modified_base 20: mod_base = OTHER; note = 2'-O-methylguanosine-3'-phosphate
  modified_base 21: mod_base = OTHER; note = 2'-O-methyluridine-3'-phosphate ((2S,4R)-1-[29-[[2-(acetylamino)-2-deoxy-beta-D-galactopyra nosyl]oxy]-14,14-bis[[3-[[3-[[5-[[2-(acetylamino)-2-deoxy-b eta-D-galactopyranosyl]oxy]-1-oxopentyl]amino]propyl]amino] -3-oxopropoxy]methyl]-1,12,19,25-tetraoxo-16-oxa-13,20,24-t riazanonacos-1-yl]-4-hydroxy-2-pyrrolidinyl)methyl ester
tagggagagaagatagcaggt

SEQ ID NO: 1061 - RNA, 21 nt, synthetic construct
  source 1..21: mol_type = other RNA
  modified_base 1: mod_base = OTHER; note = 2'-O-methylcytidine-3'-phosphorothioate
  modified_base 2: mod_base = OTHER; note = 2'-O-methyluridine-3'-phosphorothioate
  modified_base 3: mod_base = OTHER; note = 2'-O-methylguanosine-3'-phosphate
  modified_base 4: mod_base = OTHER; note = 2'-O-methylguanosine-3'-phosphate
  modified_base 5: mod_base = OTHER; note = 2'-O-methylguanosine-3'-phosphate
  modified_base 6: mod_base = OTHER; note = 2'-O-methyladenosine-3'-phosphate
  modified_base 7: mod_base = OTHER; note = 2'-deoxy-2'-fluoroadenosine-3'-phosphate
  modified_base 8: mod_base = OTHER; note = 2'-O-methylcytidine-3'-phosphate
  modified_base 9: mod_base = OTHER; note = 2'-deoxy-2'-fluorocytidine-3'-phosphate
  modified_base 10: mod_base = OTHER; note = 2'-deoxy-2'-fluorocytidine-3'-phosphate
  modified_base 11: mod_base = OTHER; note = 2'-deoxy-2'-fluoroadenosine-3'-phosphate
  modified_base 12: mod_base = OTHER; note = 2'-O-methyladenosine-3'-phosphate
  modified_base 13: mod_base = OTHER; note = 2'-O-methylguanosine-3'-phosphate
  modified_base 14: mod_base = OTHER; note = 2'-O-methyluridine-3'-phosphate
  modified_base 15: mod_base = OTHER; note = 2'-O-methylcytidine-3'-phosphate
  modified_base 16: mod_base = OTHER; note = 2'-O-methylcytidine-3'-phosphate
  modified_base 17: mod_base = OTHER; note = 2'-O-methyladenosine-3'-phosphate
  modified_base 18: mod_base = OTHER; note = 2'-O-methyladenosine-3'-phosphate
  modified_base 19: mod_base = OTHER; note = 2'-O-methylguanosine-3'-phosphate
  modified_base 20: mod_base = OTHER; note = 2'-O-methylcytidine-3'-phosphate
  modified_base 21: mod_base = OTHER; note = 2'-O-methyluridine-3'-phosphate ((2S,4R)-1-[29-[[2-(acetylamino)-2-deoxy-beta-D-galactopyra nosyl]oxy]-14,14-bis[[3-[[3-[[5-[[2-(acetylamino)-2-deoxy-b eta-D-galactopyranosyl]oxy]-1-oxopentyl]amino]propyl]amino] -3-oxopropoxy]methyl]-1,12,19,25-tetraoxo-16-oxa-13,20,24-t riazanonacos-1-yl]-4-hydroxy-2-pyrrolidinyl)methyl ester
ctgggaacccaagtccaagct

SEQ ID NO: 1062 - RNA, 21 nt, synthetic construct
  source 1..21: mol_type = other RNA
  modified_base 1: mod_base = OTHER; note = 2'-O-methyladenosine-3'-phosphorothioate
  modified_base 2: mod_base = OTHER; note = 2'-O-methylcytidine-3'-phosphorothioate
  modified_base 3: mod_base = OTHER; note = 2'-O-methylcytidine-3'-phosphate
  modified_base 4: mod_base = OTHER; note = 2'-O-methylcytidine-3'-phosphate
  modified_base 5: mod_base = OTHER; note = 2'-O-methyladenosine-3'-phosphate
  modified_base 6: mod_base = OTHER; note = 2'-O-methyladenosine-3'-phosphate
  modified_base 7: mod_base = OTHER; note = 2'-deoxy-2'-fluoroguanosine-3'-phosphate
  modified_base 8: mod_base = OTHER; note = 2'-O-methyluridine-3'-phosphate
  modified_base 9: mod_base = OTHER; note = 2'-deoxy-2'-fluorocytidine-3'-phosphate
  modified_base 10: mod_base = OTHER; note = 2'-deoxy-2'-fluorocytidine-3'-phosphate
  modified_base 11: mod_base = OTHER; note = 2'-deoxy-2'-fluoroadenosine-3'-phosphate
  modified_base 12: mod_base = OTHER; note = 2'-O-methyladenosine-3'-phosphate
  modified_base 13: mod_base = OTHER; note = 2'-O-methylguanosine-3'-phosphate
  modified_base 14: mod_base = OTHER; note = 2'-O-methylcytidine-3'-phosphate
  modified_base 15: mod_base = OTHER; note = 2'-O-methyladenosine-3'-phosphate
  modified_base 16: mod_base = OTHER; note = 2'-O-methyluridine-3'-phosphate
  modified_base 17: mod_base = OTHER; note = 2'-O-methyladenosine-3'-phosphate
  modified_base 18: mod_base = OTHER; note = 2'-O-methylcytidine-3'-phosphate
  modified_base 19: mod_base = OTHER; note = 2'-O-methylcytidine-3'-phosphate
  modified_base 20: mod_base = OTHER; note = 2'-O-methyladenosine-3'-phosphate
  modified_base 21: mod_base = OTHER; note = 2'-O-methyluridine-3'-phosphate ((2S,4R)-1-[29-[[2-(acetylamino)-2-deoxy-beta-D-galactopyra nosyl]oxy]-14,14-bis[[3-[[3-[[5-[[2-(acetylamino)-2-deoxy-b eta-D-galactopyranosyl]oxy]-1-oxopentyl]amino]propyl]amino] -3-oxopropoxy]methyl]-1,12,19,25-tetraoxo-16-oxa-13,20,24-t riazanonacos-1-yl]-4-hydroxy-2-pyrrolidinyl)methyl ester
acccaagtccaagcataccat

SEQ ID NO: 1063 - RNA, 21 nt, synthetic construct
  source 1..21: mol_type = other RNA
  modified_base 1: mod_base = OTHER; note = 2'-O-methylguanosine-3'-phosphorothioate
  modified_base 2: mod_base = OTHER; note = 2'-O-methyluridine-3'-phosphorothioate
  modified_base 3: mod_base = OTHER; note = 2'-O-methylcytidine-3'-phosphate
  modified_base 4: mod_base = OTHER; note = 2'-O-methylcytidine-3'-phosphate
  modified_base 5: mod_base = OTHER; note = 2'-O-methyladenosine-3'-phosphate
  modified_base 6: mod_base = OTHER; note = 2'-O-methyladenosine-3'-phosphate
  modified_base 7: mod_base = OTHER; note = 2'-deoxy-2'-fluoroguanosine-3'-phosphate
  modified_base 8: mod_base = OTHER; note = 2'-O-methylcytidine-3'-phosphate
  modified_base 9: mod_base = OTHER; note = 2'-deoxy-2'-fluoroadenosine-3'-phosphate
  modified_base 10: mod_base = OTHER; note = 2'-deoxy-2'-fluorouridine-3'-phosphate
  modified_base 11: mod_base = OTHER; note = 2'-deoxy-2'-fluoroadenosine-3'-phosphate
  modified_base 12: mod_base = OTHER; note = 2'-O-methylcytidine-3'-phosphate
  modified_base 13: mod_base = OTHER; note = 2'-O-methylcytidine-3'-phosphate
  modified_base 14: mod_base = OTHER; note = 2'-O-methyladenosine-3'-phosphate
  modified_base 15: mod_base = OTHER; note = 2'-O-methyladenosine-3'-phosphate
  modified_base 16: mod_base = OTHER; note = 2'-O-methylcytidine-3'-phosphate
  modified_base 17: mod_base = OTHER; note = 2'-O-methyladenosine-3'-phosphate
  modified_base 18: mod_base = OTHER; note = 2'-O-methylcytidine-3'-phosphate
  modified_base 19: mod_base = OTHER; note = 2'-O-methylguanosine-3'-phosphate
  modified_base 20: mod_base = OTHER; note = 2'-O-methyladenosine-3'-phosphate
  modified_base 21: mod_base = OTHER; note = 2'-O-methyluridine-3'-phosphate ((2S,4R)-1-[29-[[2-(acetylamino)-2-deoxy-beta-D-galactopyra nosyl]oxy]-14,14-bis[[3-[[3-[[5-[[2-(acetylamino)-2-deoxy-b eta-D-galactopyranosyl]oxy]-1-oxopentyl]amino]propyl]amino] -3-oxopropoxy]methyl]-1,12,19,25-tetraoxo-16-oxa-13,20,24-t riazanonacos-1-yl]-4-hydroxy-2-pyrrolidinyl)methyl ester
gtccaagcataccaacacgat

SEQ ID NO: 1064 - RNA, 21 nt, synthetic construct
  source 1..21: mol_type = other RNA
  modified_base 1: mod_base = OTHER; note = 2'-O-methylcytidine-3'-phosphorothioate
  modified_base 2: mod_base = OTHER; note = 2'-O-methyladenosine-3'-phosphorothioate
  modified_base 3: mod_base = OTHER; note = 2'-O-methyladenosine-3'-phosphate
  modified_base 4: mod_base = OTHER; note = 2'-O-methylcytidine-3'-phosphate
  modified_base 5: mod_base = OTHER; note = 2'-O-methyladenosine-3'-phosphate
  modified_base 6: mod_base = OTHER; note = 2'-O-methylcytidine-3'-phosphate
  modified_base 7: mod_base = OTHER; note = 2'-deoxy-2'-fluoroguanosine-3'-phosphate
  modified_base 8: mod_base = OTHER; note = 2'-O-methyladenosine-3'-phosphate
  modified_base 9: mod_base = OTHER; note = 2'-deoxy-2'-fluoroguanosine-3'-phosphate
  modified_base 10: mod_base = OTHER; note = 2'-deoxy-2'-fluorocytidine-3'-phosphate
  modified_base 11: mod_base = OTHER; note = 2'-deoxy-2'-fluoroadenosine-3'-phosphate
  modified_base 12: mod_base = OTHER; note = 2'-O-methylguanosine-3'-phosphate
  modified_base 13: mod_base = OTHER; note = 2'-O-methylguanosine-3'-phosphate
  modified_base 14: mod_base = OTHER; note = 2'-O-methylcytidine-3'-phosphate
  modified_base 15: mod_base = OTHER; note = 2'-O-methyluridine-3'-phosphate
  modified_base 16: mod_base = OTHER; note = 2'-O-methyladenosine-3'-phosphate
  modified_base 17: mod_base = OTHER; note = 2'-O-methylcytidine-3'-phosphate
  modified_base 18: mod_base = OTHER; note = 2'-O-methyluridine-3'-phosphate
  modified_base 19: mod_base = OTHER; note = 2'-O-methylguanosine-3'-phosphate
  modified_base 20: mod_base = OTHER; note = 2'-O-methyluridine-3'-phosphate
  modified_base 21: mod_base = OTHER; note = 2'-O-methyluridine-3'-phosphate ((2S,4R)-1-[29-[[2-(acetylamino)-2-deoxy-beta-D-galactopyra nosyl]oxy]-14,14-bis[[3-[[3-[[5-[[2-(acetylamino)-2-deoxy-b eta-D-galactopyranosyl]oxy]-1-oxopentyl]amino]propyl]amino] -3-oxopropoxy]methyl]-1,12,19,25-tetraoxo-16-oxa-13,20,24-t riazanonacos-1-yl]-4-hydroxy-2-pyrrolidinyl)methyl ester
caacacgagcaggctactgtt

SEQ ID NO: 1065 - RNA, 21 nt, synthetic construct
  source 1..21: mol_type = other RNA
  modified_base 1: mod_base = OTHER; note = 2'-O-methylguanosine-3'-phosphorothioate
  modified_base 2: mod_base = OTHER; note = 2'-O-methyladenosine-3'-phosphorothioate
  modified_base 3: mod_base = OTHER; note = 2'-O-methylguanosine-3'-phosphate
  modified_base 4: mod_base = OTHER; note = 2'-O-methylcytidine-3'-phosphate
  modified_base 5: mod_base = OTHER; note = 2'-O-methyladenosine-3'-phosphate
  modified_base 6: mod_base = OTHER; note = 2'-O-methylguanosine-3'-phosphate
  modified_base 7: mod_base = OTHER; note = 2'-deoxy-2'-fluoroguanosine-3'-phosphate
  modified_base 8: mod_base = OTHER; note = 2'-O-methylcytidine-3'-phosphate
  modified_base 9: mod_base = OTHER; note = 2'-deoxy-2'-fluorouridine-3'-phosphate
  modified_base 10: mod_base = OTHER; note = 2'-deoxy-2'-fluoroadenosine-3'-phosphate
  modified_base 11: mod_base = OTHER; note = 2'-deoxy-2'-fluorocytidine-3'-phosphate
  modified_base 12: mod_base = OTHER; note = 2'-O-methyluridine-3'-phosphate
  modified_base 13: mod_base = OTHER; note = 2'-O-methylguanosine-3'-phosphate
  modified_base 14: mod_base = OTHER; note = 2'-O-methyluridine-3'-phosphate
  modified_base 15: mod_base = OTHER; note = 2'-O-methylcytidine-3'-phosphate
  modified_base 16: mod_base = OTHER; note = 2'-O-methyladenosine-3'-phosphate
  modified_base 17: mod_base = OTHER; note = 2'-O-methylguanosine-3'-phosphate
  modified_base 18: mod_base = OTHER; note = 2'-O-methylcytidine-3'-phosphate
  modified_base 19: mod_base = OTHER; note = 2'-O-methyluridine-3'-phosphate
  modified_base 20: mod_base = OTHER; note = 2'-O-methylcytidine-3'-phosphate
  modified_base 21: mod_base = OTHER; note = 2'-O-methyluridine-3'-phosphate ((2S,4R)-1-[29-[[2-(acetylamino)-2-deoxy-beta-D-galactopyra nosyl]oxy]-14,14-bis[[3-[[3-[[5-[[2-(acetylamino)-2-deoxy-b eta-D-galactopyranosyl]oxy]-1-oxopentyl]amino]propyl]amino] -3-oxopropoxy]methyl]-1,12,19,25-tetraoxo-16-oxa-13,20,24-t riazanonacos-1-yl]-4-hydroxy-2-pyrrolidinyl)methyl ester
gagcaggctactgtcagctct

SEQ ID NO: 1066 - RNA, 21 nt, synthetic construct
  source 1..21: mol_type = other RNA
  modified_base 1: mod_base = OTHER; note = 2'-O-methylcytidine-3'-phosphorothioate
  modified_base 2: mod_base = OTHER; note = 2'-O-methylguanosine-3'-phosphorothioate
  modified_base 3: mod_base = OTHER; note = 2'-O-methylguanosine-3'-phosphate
  modified_base 4: mod_base = OTHER; note = 2'-O-methyladenosine-3'-phosphate
  modified_base 5: mod_base = OTHER; note = 2'-O-methylguanosine-3'-phosphate
  modified_base 6: mod_base = OTHER; note = 2'-O-methyladenosine-3'-phosphate
  modified_base 7: mod_base = OTHER; note = 2'-deoxy-2'-fluoroadenosine-3'-phosphate
  modified_base 8: mod_base = OTHER; note = 2'-O-methylguanosine-3'-phosphate
  modified_base 9: mod_base = OTHER; note = 2'-deoxy-2'-fluoroadenosine-3'-phosphate
  modified_base 10: mod_base = OTHER; note = 2'-deoxy-2'-fluoroguanosine-3'-phosphate
  modified_base 11: mod_base = OTHER; note = 2'-deoxy-2'-fluorocytidine-3'-phosphate
  modified_base 12: mod_base = OTHER; note = 2'-O-methyluridine-3'-phosphate
  modified_base 13: mod_base = OTHER; note = 2'-O-methylguanosine-3'-phosphate
  modified_base 14: mod_base = OTHER; note = 2'-O-methyluridine-3'-phosphate
  modified_base 15: mod_base = OTHER; note = 2'-O-methyluridine-3'-phosphate
  modified_base 16: mod_base = OTHER; note = 2'-O-methylcytidine-3'-phosphate
  modified_base 17: mod_base = OTHER; note = 2'-O-methyladenosine-3'-phosphate
  modified_base 18: mod_base = OTHER; note = 2'-O-methylcytidine-3'-phosphate
  modified_base 19: mod_base = OTHER; note = 2'-O-methyladenosine-3'-phosphate
  modified_base 20: mod_base = OTHER; note = 2'-O-methylguanosine-3'-phosphate
  modified_base 21: mod_base = OTHER; note = 2'-O-methyluridine-3'-phosphate ((2S,4R)-1-[29-[[2-(acetylamino)-2-deoxy-beta-D-galactopyra nosyl]oxy]-14,14-bis[[3-[[3-[[5-[[2-(acetylamino)-2-deoxy-b eta-D-galactopyranosyl]oxy]-1-oxopentyl]amino]propyl]amino] -3-oxopropoxy]methyl]-1,12,19,25-tetraoxo-16-oxa-13,20,24-t riazanonacos-1-yl]-4-hydroxy-2-pyrrolidinyl)methyl ester
cggagaagagctgttcacagt

SEQ ID NO: 1067 - RNA, 21 nt, synthetic construct
  source 1..21: mol_type = other RNA
  modified_base 1: mod_base = OTHER; note = 2'-O-methylguanosine-3'-phosphorothioate
  modified_base 2: mod_base = OTHER; note = 2'-O-methyladenosine-3'-phosphorothioate
  modified_base 3: mod_base = OTHER; note = 2'-O-methylguanosine-3'-phosphate
  modified_base 4: mod_base = OTHER; note = 2'-O-methylcytidine-3'-phosphate
  modified_base 5: mod_base = OTHER; note = 2'-O-methyluridine-3'-phosphate
  modified_base 6: mod_base = OTHER; note = 2'-O-methylguanosine-3'-phosphate
  modified_base 7: mod_base = OTHER; note = 2'-deoxy-2'-fluorouridine-3'-phosphate
  modified_base 8: mod_base = OTHER; note = 2'-O-methyluridine-3'-phosphate
  modified_base 9: mod_base = OTHER; note = 2'-deoxy-2'-fluorocytidine-3'-phosphate
  modified_base 10: mod_base = OTHER; note = 2'-deoxy-2'-fluoroadenosine-3'-phosphate
  modified_base 11: mod_base = OTHER; note = 2'-deoxy-2'-fluorocytidine-3'-phosphate
  modified_base 12: mod_base = OTHER; note = 2'-O-methyladenosine-3'-phosphate
  modified_base 13: mod_base = OTHER; note = 2'-O-methylguanosine-3'-phosphate
  modified_base 14: mod_base = OTHER; note = 2'-O-methylcytidine-3'-phosphate
  modified_base 15: mod_base = OTHER; note = 2'-O-methylcytidine-3'-phosphate
  modified_base 16: mod_base = OTHER; note = 2'-O-methyladenosine-3'-phosphate
  modified_base 17: mod_base = OTHER; note = 2'-O-methylguanosine-3'-phosphate
  modified_base 18: mod_base = OTHER; note = 2'-O-methyladenosine-3'-phosphate
  modified_base 19: mod_base = OTHER; note = 2'-O-methylcytidine-3'-phosphate
  modified_base 20: mod_base = OTHER; note = 2'-O-methyluridine-3'-phosphate
  modified_base 21: mod_base = OTHER; note = 2'-O-methyluridine-3'-phosphate ((2S,4R)-1-[29-[[2-(acetylamino)-2-deoxy-beta-D-galactopyra nosyl]oxy]-14,14-bis[[3-[[3-[[5-[[2-(acetylamino)-2-deoxy-b eta-D-galactopyranosyl]oxy]-1-oxopentyl]amino]propyl]amino] -3-oxopropoxy]methyl]-1,12,19,25-tetraoxo-16-oxa-13,20,24-t riazanonacos-1-yl]-4-hydroxy-2-pyrrolidinyl)methyl ester
gagctgttcacagccagactt

SEQ ID NO: 1068 - RNA, 21 nt, synthetic construct
  source 1..21: mol_type = other RNA
  modified_base 1: mod_base = OTHER; note = 2'-O-methyladenosine-3'-phosphorothioate
  modified_base 2: mod_base = OTHER; note = 2'-O-methylcytidine-3'-phosphorothioate
  modified_base 3: mod_base = OTHER; note = 2'-O-methyladenosine-3'-phosphate
  modified_base 4: mod_base = OTHER; note = 2'-O-methylguanosine-3'-phosphate
  modified_base 5: mod_base = OTHER; note = 2'-O-methylcytidine-3'-phosphate
  modified_base 6: mod_base = OTHER; note = 2'-O-methylcytidine-3'-phosphate
  modified_base 7: mod_base = OTHER; note = 2'-deoxy-2'-fluoroadenosine-3'-phosphate
  modified_base 8: mod_base = OTHER; note = 2'-O-methylguanosine-3'-phosphate
  modified_base 9: mod_base = OTHER; note = 2'-deoxy-2'-fluoroadenosine-3'-phosphate
  modified_base 10: mod_base = OTHER; note = 2'-deoxy-2'-fluorocytidine-3'-phosphate
  modified_base 11: mod_base = OTHER; note = 2'-deoxy-2'-fluorouridine-3'-phosphate
  modified_base 12: mod_base = OTHER; note = 2'-O-methylguanosine-3'-phosphate
  modified_base 13: mod_base = OTHER; note = 2'-O-methylguanosine-3'-phosphate
  modified_base 14: mod_base = OTHER; note = 2'-O-methylcytidine-3'-phosphate
  modified_base 15: mod_base = OTHER; note = 2'-O-methyladenosine-3'-phosphate
  modified_base 16: mod_base = OTHER; note = 2'-O-methylcytidine-3'-phosphate
  modified_base 17: mod_base = OTHER; note = 2'-O-methyladenosine-3'-phosphate
  modified_base 18: mod_base = OTHER; note = 2'-O-methylguanosine-3'-phosphate
  modified_base 19: mod_base = OTHER; note = 2'-O-methyluridine-3'-phosphate
  modified_base 20: mod_base = OTHER; note = 2'-O-methyluridine-3'-phosphate
  modified_base 21: mod_base = OTHER; note = 2'-O-methyluridine-3'-phosphate ((2S,4R)-1-[29-[[2-(acetylamino)-2-deoxy-beta-D-galactopyra nosyl]oxy]-14,14-bis[[3-[[3-[[5-[[2-(acetylamino)-2-deoxy-b eta-D-galactopyranosyl]oxy]-1-oxopentyl]amino]propyl]amino] -3-oxopropoxy]methyl]-1,12,19,25-tetraoxo-16-oxa-13,20,24-t riazanonacos-1-yl]-4-hydroxy-2-pyrrolidinyl)methyl ester
acagccagactggcacagttt

SEQ ID NO: 1069 - RNA, 21 nt, synthetic construct
  source 1..21: mol_type = other RNA
  modified_base 1: mod_base = OTHER; note = 2'-O-methyluridine-3'-phosphorothioate
  modified_base 2: mod_base = OTHER; note = 2'-O-methylguanosine-3'-phosphorothioate
  modified_base 3: mod_base = OTHER; note = 2'-O-methylguanosine-3'-phosphate
  modified_base 4: mod_base = OTHER; note = 2'-O-methylcytidine-3'-phosphate
  modified_base 5: mod_base = OTHER; note = 2'-O-methyladenosine-3'-phosphate
  modified_base 6: mod_base = OTHER; note = 2'-O-methylcytidine-3'-phosphate
  modified_base 7: mod_base = OTHER; note = 2'-deoxy-2'-fluoroadenosine-3'-phosphate
  modified_base 8: mod_base = OTHER; note = 2'-O-methylguanosine-3'-phosphate
  modified_base 9: mod_base = OTHER; note = 2'-deoxy-2'-fluorouridine-3'-phosphate
  modified_base 10: mod_base = OTHER; note = 2'-deoxy-2'-fluorouridine-3'-phosphate
  modified_base 11: mod_base = OTHER; note = 2'-deoxy-2'-fluorouridine-3'-phosphate
  modified_base 12: mod_base = OTHER; note = 2'-O-methyluridine-3'-phosphate
  modified_base 13: mod_base = OTHER; note = 2'-O-methylcytidine-3'-phosphate
  modified_base 14: mod_base = OTHER; note = 2'-O-methyluridine-3'-phosphate
  modified_base 15: mod_base = OTHER; note = 2'-O-methylguanosine-3'-phosphate
  modified_base 16: mod_base = OTHER; note = 2'-O-methyladenosine-3'-phosphate
  modified_base 17: mod_base = OTHER; note = 2'-O-methylguanosine-3'-phosphate
  modified_base 18: mod_base = OTHER; note = 2'-O-methyladenosine-3'-phosphate
  modified_base 19: mod_base = OTHER; note = 2'-O-methyladenosine-3'-phosphate
  modified_base 20: mod_base = OTHER; note = 2'-O-methyladenosine-3'-phosphate
  modified_base 21: mod_base = OTHER; note = 2'-O-methyluridine-3'-phosphate ((2S,4R)-1-[29-[[2-(acetylamino)-2-deoxy-beta-D-galactopyra nosyl]oxy]-14,14-bis[[3-[[3-[[5-[[2-(acetylamino)-2-deoxy-b eta-D-galactopyranosyl]oxy]-1-oxopentyl]amino]propyl]amino] -3-oxopropoxy]methyl]-1,12,19,25-tetraoxo-16-oxa-13,20,24-t riazanonacos-1-yl]-4-hydroxy-2-pyrrolidinyl)methyl ester
tggcacagttttctgagaaat

SEQ ID NO: 1070 - RNA, 21 nt, synthetic construct
  source 1..21: mol_type = other RNA
  modified_base 1: mod_base = OTHER; note = 2'-O-methyladenosine-3'-phosphorothioate
  modified_base 2: mod_base = OTHER; note = 2'-O-methylguanosine-3'-phosphorothioate
  modified_base 3: mod_base = OTHER; note = 2'-O-methyluridine-3'-phosphate
  modified_base 4: mod_base = OTHER; note = 2'-O-methyluridine-3'-phosphate
  modified_base 5: mod_base = OTHER; note = 2'-O-methyluridine-3'-phosphate
  modified_base 6: mod_base = OTHER; note = 2'-O-methyluridine-3'-phosphate
  modified_base 7: mod_base = OTHER; note = 2'-deoxy-2'-fluorocytidine-3'-phosphate
  modified_base 8: mod_base = OTHER; note = 2'-O-methyluridine-3'-phosphate
  modified_base 9: mod_base = OTHER; note = 2'-deoxy-2'-fluoroguanosine-3'-phosphate
  modified_base 10: mod_base = OTHER; note = 2'-deoxy-2'-fluoroadenosine-3'-phosphate
  modified_base 11: mod_base = OTHER; note = 2'-deoxy-2'-fluoroguanosine-3'-phosphate
  modified_base 12: mod_base = OTHER; note = 2'-O-methyladenosine-3'-phosphate
  modified_base 13: mod_base = OTHER; note = 2'-O-methyladenosine-3'-phosphate
  modified_base 14: mod_base = OTHER; note = 2'-O-methyladenosine-3'-phosphate
  modified_base 15: mod_base = OTHER; note = 2'-O-methylguanosine-3'-phosphate
  modified_base 16: mod_base = OTHER; note = 2'-O-methyladenosine-3'-phosphate
  modified_base 17: mod_base = OTHER; note = 2'-O-methylcytidine-3'-phosphate
  modified_base 18: mod_base = OTHER; note = 2'-O-methyluridine-3'-phosphate
  modified_base 19: mod_base = OTHER; note = 2'-O-methyladenosine-3'-phosphate
  modified_base 20: mod_base = OTHER; note = 2'-O-methyluridine-3'-phosphate
  modified_base 21: mod_base = OTHER; note = 2'-O-methyluridine-3'-phosphate ((2S,4R)-1-[29-[[2-(acetylamino)-2-deoxy-beta-D-galactopyra nosyl]oxy]-14,14-bis[[3-[[3-[[5-[[2-(acetylamino)-2-deoxy-b eta-D-galactopyranosyl]oxy]-1-oxopentyl]amino]propyl]amino] -3-oxopropoxy]methyl]-1,12,19,25-tetraoxo-16-oxa-13,20,24-t riazanonacos-1-yl]-4-hydroxy-2-pyrrolidinyl)methyl ester
agttttctgagaaagactatt

SEQ ID NO: 1071 - RNA, 21 nt, synthetic construct
  source 1..21: mol_type = other RNA
  modified_base 1: mod_base = OTHER; note = 2'-O-methylcytidine-3'-phosphorothioate
  modified_base 2: mod_base = OTHER; note = 2'-O-methyluridine-3'-phosphorothioate
  modified_base 3: mod_base = OTHER; note = 2'-O-methylguanosine-3'-phosphate
  modified_base 4: mod_base = OTHER; note = 2'-O-methyladenosine-3'-phosphate
  modified_base 5: mod_base = OTHER; note = 2'-O-methylguanosine-3'-phosphate
  modified_base 6: mod_base = OTHER; note = 2'-O-methyladenosine-3'-phosphate
  modified_base 7: mod_base = OTHER; note = 2'-deoxy-2'-fluoroadenosine-3'-phosphate
  modified_base 8: mod_base = OTHER; note = 2'-O-methyladenosine-3'-phosphate
  modified_base 9: mod_base = OTHER; note = 2'-deoxy-2'-fluoroguanosine-3'-phosphate
  modified_base 10: mod_base = OTHER; note = 2'-deoxy-2'-fluoroadenosine-3'-phosphate
  modified_base 11: mod_base = OTHER; note = 2'-deoxy-2'-fluorocytidine-3'-phosphate
  modified_base 12: mod_base = OTHER; note = 2'-O-methyluridine-3'-phosphate
  modified_base 13: mod_base = OTHER; note = 2'-O-methyladenosine-3'-phosphate
  modified_base 14: mod_base = OTHER; note = 2'-O-methyluridine-3'-phosphate
  modified_base 15: mod_base = OTHER; note = 2'-O-methyluridine-3'-phosphate
  modified_base 16: mod_base = OTHER; note = 2'-O-methylcytidine-3'-phosphate
  modified_base 17: mod_base = OTHER; note = 2'-O-methyladenosine-3'-phosphate
  modified_base 18: mod_base = OTHER; note = 2'-O-methyladenosine-3'-phosphate
  modified_base 19: mod_base = OTHER; note = 2'-O-methyladenosine-3'-phosphate
  modified_base 20: mod_base = OTHER; note = 2'-O-methylcytidine-3'-phosphate
  modified_base 21: mod_base = OTHER; note = 2'-O-methyluridine-3'-phosphate ((2S,4R)-1-[29-[[2-(acetylamino)-2-deoxy-beta-D-galactopyra nosyl]oxy]-14,14-bis[[3-[[3-[[5-[[2-(acetylamino)-2-deoxy-b eta-D-galactopyranosyl]oxy]-1-oxopentyl]amino]propyl]amino] -3-oxopropoxy]methyl]-1,12,19,25-tetraoxo-16-oxa-13,20,24-t riazanonacos-1-yl]-4-hydroxy-2-pyrrolidinyl)methyl ester
ctgagaaagactattcaaact

SEQ ID NO: 1072 - RNA, 21 nt, synthetic construct
  source 1..21: mol_type = other RNA
  modified_base 1: mod_base = OTHER; note = 2'-O-methyladenosine-3'-phosphorothioate
  modified_base 2: mod_base = OTHER; note = 2'-O-methyladenosine-3'-phosphorothioate
  modified_base 3: mod_base = OTHER; note = 2'-O-methylguanosine-3'-phosphate
  modified_base 4: mod_base = OTHER; note = 2'-O-methyladenosine-3'-phosphate
  modified_base 5: mod_base = OTHER; note = 2'-O-methylcytidine-3'-phosphate
  modified_base 6: mod_base = OTHER; note = 2'-O-methyluridine-3'-phosphate
  modified_base 7: mod_base = OTHER; note = 2'-deoxy-2'-fluoroadenosine-3'-phosphate
  modified_base 8: mod_base = OTHER; note = 2'-O-methyluridine-3'-phosphate
  modified_base 9: mod_base = OTHER; note = 2'-deoxy-2'-fluorouridine-3'-phosphate
  modified_base 10: mod_base = OTHER; note = 2'-deoxy-2'-fluorocytidine-3'-phosphate
  modified_base 11: mod_base = OTHER; note = 2'-deoxy-2'-fluoroadenosine-3'-phosphate
  modified_base 12: mod_base = OTHER; note = 2'-O-methyladenosine-3'-phosphate
  modified_base 13: mod_base = OTHER; note = 2'-O-methyladenosine-3'-phosphate
  modified_base 14: mod_base = OTHER; note = 2'-O-methylcytidine-3'-phosphate
  modified_base 15: mod_base = OTHER; note = 2'-O-methyladenosine-3'-phosphate
  modified_base 16: mod_base = OTHER; note = 2'-O-methylguanosine-3'-phosphate
  modified_base 17: mod_base = OTHER; note = 2'-O-methyluridine-3'-phosphate
  modified_base 18: mod_base = OTHER; note = 2'-O-methylcytidine-3'-phosphate
  modified_base 19: mod_base = OTHER; note = 2'-O-methyluridine-3'-phosphate
  modified_base 20: mod_base = OTHER; note = 2'-O-methylcytidine-3'-phosphate
  modified_base 21: mod_base = OTHER; note = 2'-O-methyluridine-3'-phosphate ((2S,4R)-1-[29-[[2-(acetylamino)-2-deoxy-beta-D-galactopyra nosyl]oxy]-14,14-bis[[3-[[3-[[5-[[2-(acetylamino)-2-deoxy-b eta-D-galactopyranosyl]oxy]-1-oxopentyl]amino]propyl]amino] -3-oxopropoxy]methyl]-1,12,19,25-tetraoxo-16-oxa-13,20,24-t riazanonacos-1-yl]-4-hydroxy-2-pyrrolidinyl)methyl ester
aagactattcaaacagtctct

SEQ ID NO: 1073 - RNA, 21 nt, synthetic construct
  source 1..21: mol_type = other RNA
  modified_base 1: mod_base = OTHER; note = 2'-O-methyluridine-3'-phosphorothioate
  modified_base 2: mod_base = OTHER; note = 2'-O-methyluridine-3'-phosphorothioate
  modified_base 3: mod_base = OTHER; note = 2'-O-methylcytidine-3'-phosphate
  modified_base 4: mod_base = OTHER; note = 2'-O-methyladenosine-3'-phosphate
  modified_base 5: mod_base = OTHER; note = 2'-O-methyladenosine-3'-phosphate
  modified_base 6: mod_base = OTHER; note = 2'-O-methyladenosine-3'-phosphate
  modified_base 7: mod_base = OTHER; note = 2'-deoxy-2'-fluorocytidine-3'-phosphate
  modified_base 8: mod_base = OTHER; note = 2'-O-methyladenosine-3'-phosphate
  modified_base 9: mod_base = OTHER; note = 2'-deoxy-2'-fluoroguanosine-3'-phosphate
  modified_base 10: mod_base = OTHER; note = 2'-deoxy-2'-fluorouridine-3'-phosphate
  modified_base 11: mod_base = OTHER; note = 2'-deoxy-2'-fluorocytidine-3'-phosphate
  modified_base 12: mod_base = OTHER; note = 2'-O-methyluridine-3'-phosphate
  modified_base 13: mod_base = OTHER; note = 2'-O-methylcytidine-3'-phosphate
  modified_base 14: mod_base = OTHER; note = 2'-O-methyladenosine-3'-phosphate
  modified_base 15: mod_base = OTHER; note = 2'-O-methylguanosine-3'-phosphate
  modified_base 16: mod_base = OTHER; note = 2'-O-methylguanosine-3'-phosphate
  modified_base 17: mod_base = OTHER; note = 2'-O-methyladenosine-3'-phosphate
  modified_base 18: mod_base = OTHER; note = 2'-O-methyladenosine-3'-phosphate
  modified_base 19: mod_base = OTHER; note = 2'-O-methyladenosine-3'-phosphate
  modified_base 20: mod_base = OTHER; note = 2'-O-methyluridine-3'-phosphate
  modified_base 21: mod_base = OTHER; note = 2'-O-methyluridine-3'-phosphate ((2S,4R)-1-[29-[[2-(acetylamino)-2-deoxy-beta-D-galactopyra nosyl]oxy]-14,14-bis[[3-[[3-[[5-[[2-(acetylamino)-2-deoxy-b eta-D-galactopyranosyl]oxy]-1-oxopentyl]amino]propyl]amino] -3-oxopropoxy]methyl]-1,12,19,25-tetraoxo-16-oxa-13,20,24-t riazanonacos-1-yl]-4-hydroxy-2-pyrrolidinyl)methyl ester
ttcaaacagtctcaggaaatt

SEQ ID NO: 1074 - RNA, 21 nt, synthetic construct
  source 1..21: mol_type = other RNA
  modified_base 1: mod_base = OTHER; note = 2'-O-methylguanosine-3'-phosphorothioate
  modified_base 2: mod_base = OTHER; note = 2'-O-methyluridine-3'-phosphorothioate
  modified_base 3: mod_base = OTHER; note = 2'-O-methylcytidine-3'-phosphate
  modified_base 4: mod_base = OTHER; note = 2'-O-methyluridine-3'-phosphate
  modified_base 5: mod_base = OTHER; note = 2'-O-methylcytidine-3'-phosphate
  modified_base 6: mod_base = OTHER; note = 2'-O-methyladenosine-3'-phosphate
  modified_base 7: mod_base = OTHER; note = 2'-deoxy-2'-fluoroguanosine-3'-phosphate
  modified_base 8: mod_base = OTHER; note = 2'-O-methylguanosine-3'-phosphate
  modified_base 9: mod_base = OTHER; note = 2'-deoxy-2'-fluoroadenosine-3'-phosphate
  modified_base 10: mod_base = OTHER; note = 2'-deoxy-2'-fluoroadenosine-3'-phosphate
  modified_base 11: mod_base = OTHER; note = 2'-deoxy-2'-fluoroadenosine-3'-phosphate
  modified_base 12: mod_base = OTHER; note = 2'-O-methyluridine-3'-phosphate
  modified_base 13: mod_base = OTHER; note = 2'-O-methylcytidine-3'-phosphate
  modified_base 14: mod_base = OTHER; note = 2'-O-methyladenosine-3'-phosphate
  modified_base 15: mod_base = OTHER; note = 2'-O-methyladenosine-3'-phosphate
  modified_base 16: mod_base = OTHER; note = 2'-O-methyladenosine-3'-phosphate
  modified_base 17: mod_base = OTHER; note = 2'-O-methyluridine-3'-phosphate
  modified_base 18: mod_base = OTHER; note = 2'-O-methyladenosine-3'-phosphate
  modified_base 19: mod_base = OTHER; note = 2'-O-methyluridine-3'-phosphate
  modified_base 20: mod_base = OTHER; note = 2'-O-methylguanosine-3'-phosphate
  modified_base 21: mod_base = OTHER; note = 2'-O-methyluridine-3'-phosphate ((2S,4R)-1-[29-[[2-(acetylamino)-2-deoxy-beta-D-galactopyra nosyl]oxy]-14,14-bis[[3-[[3-[[5-[[2-(acetylamino)-2-deoxy-b eta-D-galactopyranosyl]oxy]-1-oxopentyl]amino]propyl]amino] -3-oxopropoxy]methyl]-1,12,19,25-tetraoxo-16-oxa-13,20,24-t riazanonacos-1-yl]-4-hydroxy-2-pyrrolidinyl)methyl ester
gtctcaggaaatcaaatatgt

SEQ ID NO: 1075 - RNA, 21 nt, synthetic construct
  source 1..21: mol_type = other RNA
  modified_base 1: mod_base = OTHER; note = 2'-O-methylguanosine-3'-phosphorothioate
  modified_base 2: mod_base = OTHER; note = 2'-O-methylguanosine-3'-phosphorothioate
  modified_base 3: mod_base = OTHER; note = 2'-O-methyladenosine-3'-phosphate
  modified_base 4: mod_base = OTHER; note = 2'-O-methyladenosine-3'-phosphate
  modified_base 5: mod_base = OTHER; note = 2'-O-methyladenosine-3'-phosphate
  modified_base 6: mod_base = OTHER; note = 2'-O-methyluridine-3'-phosphate
  modified_base 7: mod_base = OTHER; note = 2'-deoxy-2'-fluorocytidine-3'-phosphate
  modified_base 8: mod_base = OTHER; note = 2'-O-methyladenosine-3'-phosphate
  modified_base 9: mod_base = OTHER; note = 2'-deoxy-2'-fluoroadenosine-3'-phosphate
  modified_base 10: mod_base = OTHER; note = 2'-deoxy-2'-fluoroadenosine-3'-phosphate
  modified_base 11: mod_base = OTHER; note = 2'-deoxy-2'-fluorouridine-3'-phosphate
  modified_base 12: mod_base = OTHER; note = 2'-O-methyladenosine-3'-phosphate
  modified_base 13: mod_base = OTHER; note = 2'-O-methyluridine-3'-phosphate
  modified_base 14: mod_base = OTHER; note = 2'-O-methylguanosine-3'-phosphate
  modified_base 15: mod_base = OTHER; note = 2'-O-methylcytidine-3'-phosphate
  modified_base 16: mod_base = OTHER; note = 2'-O-methyladenosine-3'-phosphate
  modified_base 17: mod_base = OTHER; note = 2'-O-methyladenosine-3'-phosphate
  modified_base 18: mod_base = OTHER; note = 2'-O-methyladenosine-3'-phosphate
  modified_base 19: mod_base = OTHER; note = 2'-O-methylguanosine-3'-phosphate
  modified_base 20: mod_base = OTHER; note = 2'-O-methylcytidine-3'-phosphate
  modified_base 21: mod_base = OTHER; note = 2'-O-methyluridine-3'-phosphate ((2S,4R)-1-[29-[[2-(acetylamino)-2-deoxy-beta-D-galactopyra nosyl]oxy]-14,14-bis[[3-[[3-[[5-[[2-(acetylamino)-2-deoxy-b eta-D-galactopyranosyl]oxy]-1-oxopentyl]amino]propyl]amino] -3-oxopropoxy]methyl]-1,12,19,25-tetraoxo-16-oxa-13,20,24-t riazanonacos-1-yl]-4-hydroxy-2-pyrrolidinyl)methyl ester
ggaaatcaaatatgcaaagct

SEQ ID NO: 1076 - RNA, 21 nt, synthetic construct
  source 1..21: mol_type = other RNA
  modified_base 1: mod_base = OTHER; note = 2'-O-methylcytidine-3'-phosphorothioate
  modified_base 2: mod_base = OTHER; note = 2'-O-methyladenosine-3'-phosphorothioate
  modified_base 3: mod_base = OTHER; note = 2'-O-methyladenosine-3'-phosphate
  modified_base 4: mod_base = OTHER; note = 2'-O-methyladenosine-3'-phosphate
  modified_base 5: mod_base = OTHER; note = 2'-O-methyluridine-3'-phosphate
  modified_base 6: mod_base = OTHER; note = 2'-O-methyladenosine-3'-phosphate
  modified_base 7: mod_base = OTHER; note = 2'-deoxy-2'-fluorouridine-3'-phosphate
  modified_base 8: mod_base = OTHER; note = 2'-O-methylguanosine-3'-phosphate
  modified_base 9: mod_base = OTHER; note = 2'-deoxy-2'-fluorocytidine-3'-phosphate
  modified_base 10: mod_base = OTHER; note = 2'-deoxy-2'-fluoroadenosine-3'-phosphate
  modified_base 11: mod_base = OTHER; note = 2'-deoxy-2'-fluoroadenosine-3'-phosphate
  modified_base 12: mod_base = OTHER; note = 2'-O-methyladenosine-3'-phosphate
  modified_base 13: mod_base = OTHER; note = 2'-O-methylguanosine-3'-phosphate
  modified_base 14: mod_base = OTHER; note = 2'-O-methylcytidine-3'-phosphate
  modified_base 15: mod_base = OTHER; note = 2'-O-methyladenosine-3'-phosphate
  modified_base 16: mod_base = OTHER; note = 2'-O-methylcytidine-3'-phosphate
  modified_base 17: mod_base = OTHER; note = 2'-O-methyluridine-3'-phosphate
  modified_base 18: mod_base = OTHER; note = 2'-O-methylguanosine-3'-phosphate
  modified_base 19: mod_base = OTHER; note = 2'-O-methyladenosine-3'-phosphate
  modified_base 20: mod_base = OTHER; note = 2'-O-methylcytidine-3'-phosphate
  modified_base 21: mod_base = OTHER; note = 2'-O-methyluridine-3'-phosphate ((2S,4R)-1-[29-[[2-(acetylamino)-2-deoxy-beta-D-galactopyra nosyl]oxy]-14,14-bis[[3-[[3-[[5-[[2-(acetylamino)-2-deoxy-b eta-D-galactopyranosyl]oxy]-1-oxopentyl]amino]propyl]amino] -3-oxopropoxy]methyl]-1,12,19,25-tetraoxo-16-oxa-13,20,24-t riazanonacos-1-yl]-4-hydroxy-2-pyrrolidinyl)methyl ester
caaatatgcaaagcactgact

SEQ ID NO: 1077 - RNA, 21 nt, synthetic construct
  source 1..21: mol_type = other RNA
  modified_base 1: mod_base = OTHER; note = 2'-O-methyluridine-3'-phosphorothioate
  modified_base 2: mod_base = OTHER; note = 2'-O-methylguanosine-3'-phosphorothioate
  modified_base 3: mod_base = OTHER; note = 2'-O-methylcytidine-3'-phosphate
  modified_base 4: mod_base = OTHER; note = 2'-O-methyladenosine-3'-phosphate
  modified_base 5: mod_base = OTHER; note = 2'-O-methyladenosine-3'-phosphate
  modified_base 6: mod_base = OTHER; note = 2'-O-methyladenosine-3'-phosphate
  modified_base 7: mod_base = OTHER; note = 2'-deoxy-2'-fluoroguanosine-3'-phosphate
  modified_base 8: mod_base = OTHER; note = 2'-O-methylcytidine-3'-phosphate
  modified_base 9: mod_base = OTHER; note = 2'-deoxy-2'-fluoroadenosine-3'-phosphate
  modified_base 10: mod_base = OTHER; note = 2'-deoxy-2'-fluorocytidine-3'-phosphate
  modified_base 11: mod_base = OTHER; note = 2'-deoxy-2'-fluorouridine-3'-phosphate
  modified_base 12: mod_base = OTHER; note = 2'-O-methylguanosine-3'-phosphate
  modified_base 13: mod_base = OTHER; note = 2'-O-methyladenosine-3'-phosphate
  modified_base 14: mod_base = OTHER; note = 2'-O-methylcytidine-3'-phosphate
  modified_base 15: mod_base = OTHER; note = 2'-O-methyluridine-3'-phosphate
  modified_base 16: mod_base = OTHER; note = 2'-O-methyluridine-3'-phosphate
  modified_base 17: mod_base = OTHER; note = 2'-O-methylcytidine-3'-phosphate
  modified_base 18: mod_base = OTHER; note = 2'-O-methyluridine-3'-phosphate
  modified_base 19: mod_base = OTHER; note = 2'-O-methyladenosine-3'-phosphate
  modified_base 20: mod_base = OTHER; note = 2'-O-methyladenosine-3'-phosphate
  modified_base 21: mod_base = OTHER; note = 2'-O-methyluridine-3'-phosphate ((2S,4R)-1-[29-[[2-(acetylamino)-2-deoxy-beta-D-galactopyra nosyl]oxy]-14,14-bis[[3-[[3-[[5-[[2-(acetylamino)-2-deoxy-b eta-D-galactopyranosyl]oxy]-1-oxopentyl]amino]propyl]amino] -3-oxopropoxy]methyl]-1,12,19,25-tetraoxo-16-oxa-13,20,24-t riazanonacos-1-yl]-4-hydroxy-2-pyrrolidinyl)methyl ester
tgcaaagcactgacttctaat

SEQ ID NO: 1078 - RNA, 21 nt, synthetic construct
  source 1..21: mol_type = other RNA
  modified_base 1: mod_base = OTHER; note = 2'-O-methylguanosine-3'-phosphorothioate
  modified_base 2: mod_base = OTHER; note = 2'-O-methylcytidine-3'-phosphorothioate
  modified_base 3: mod_base = OTHER; note = 2'-O-methyladenosine-3'-phosphate
  modified_base 4: mod_base = OTHER; note = 2'-O-methylcytidine-3'-phosphate
  modified_base 5: mod_base = OTHER; note = 2'-O-methyluridine-3'-phosphate
  modified_base 6: mod_base = OTHER; note = 2'-O-methylguanosine-3'-phosphate
  modified_base 7: mod_base = OTHER; note = 2'-deoxy-2'-fluoroadenosine-3'-phosphate
  modified_base 8: mod_base = OTHER; note = 2'-O-methylcytidine-3'-phosphate
  modified_base 9: mod_base = OTHER; note = 2'-deoxy-2'-fluorouridine-3'-phosphate
  modified_base 10: mod_base = OTHER; note = 2'-deoxy-2'-fluorouridine-3'-phosphate
  modified_base 11: mod_base = OTHER; note = 2'-deoxy-2'-fluorocytidine-3'-phosphate
  modified_base 12: mod_base = OTHER; note = 2'-O-methyluridine-3'-phosphate
  modified_base 13: mod_base = OTHER; note = 2'-O-methyladenosine-3'-phosphate
  modified_base 14: mod_base = OTHER; note = 2'-O-methyladenosine-3'-phosphate
  modified_base 15: mod_base = OTHER; note = 2'-O-methylguanosine-3'-phosphate
  modified_base 16: mod_base = OTHER; note = 2'-O-methyluridine-3'-phosphate
  modified_base 17: mod_base = OTHER; note = 2'-O-methyladenosine-3'-phosphate
  modified_base 18: mod_base = OTHER; note = 2'-O-methyladenosine-3'-phosphate
  modified_base 19: mod_base = OTHER; note = 2'-O-methyladenosine-3'-phosphate
  modified_base 20: mod_base = OTHER; note = 2'-O-methyladenosine-3'-phosphate
  modified_base 21: mod_base = OTHER; note = 2'-O-methyluridine-3'-phosphate ((2S,4R)-1-[29-[[2-(acetylamino)-2-deoxy-beta-D-galactopyra nosyl]oxy]-14,14-bis[[3-[[3-[[5-[[2-(acetylamino)-2-deoxy-b eta-D-galactopyranosyl]oxy]-1-oxopentyl]amino]propyl]amino] -3-oxopropoxy]methyl]-1,12,19,25-tetraoxo-16-oxa-13,20,24-t riazanonacos-1-yl]-4-hydroxy-2-pyrrolidinyl)methyl ester
gcactgacttctaagtaaaat

SEQ ID NO: 1079 - RNA, 21 nt, synthetic construct
  source 1..21: mol_type = other RNA
  modified_base 1: mod_base = OTHER; note = 2'-O-methyladenosine-3'-phosphorothioate
  modified_base 2: mod_base = OTHER; note = 2'-O-methylcytidine-3'-phosphorothioate
  modified_base 3: mod_base = OTHER; note = 2'-O-methyluridine-3'-phosphate
  modified_base 4: mod_base = OTHER; note = 2'-O-methyluridine-3'-phosphate
  modified_base 5: mod_base = OTHER; note = 2'-O-methylcytidine-3'-phosphate
  modified_base 6: mod_base = OTHER; note = 2'-O-methyluridine-3'-phosphate
  modified_base 7: mod_base = OTHER; note = 2'-deoxy-2'-fluoroadenosine-3'-phosphate
  modified_base 8: mod_base = OTHER; note = 2'-O-methyladenosine-3'-phosphate
  modified_base 9: mod_base = OTHER; note = 2'-deoxy-2'-fluoroguanosine-3'-phosphate
  modified_base 10: mod_base = OTHER; note = 2'-deoxy-2'-fluorouridine-3'-phosphate
  modified_base 11: mod_base = OTHER; note = 2'-deoxy-2'-fluoroadenosine-3'-phosphate
  modified_base 12: mod_base = OTHER; note = 2'-O-methyladenosine-3'-phosphate
  modified_base 13: mod_base = OTHER; note = 2'-O-methyladenosine-3'-phosphate
  modified_base 14: mod_base = OTHER; note = 2'-O-methyladenosine-3'-phosphate
  modified_base 15: mod_base = OTHER; note = 2'-O-methylcytidine-3'-phosphate
  modified_base 16: mod_base = OTHER; note = 2'-O-methylcytidine-3'-phosphate
  modified_base 17: mod_base = OTHER; note = 2'-O-methyladenosine-3'-phosphate
  modified_base 18: mod_base = OTHER; note = 2'-O-methylcytidine-3'-phosphate
  modified_base 19: mod_base = OTHER; note = 2'-O-methyladenosine-3'-phosphate
  modified_base 20: mod_base = OTHER; note = 2'-O-methylguanosine-3'-phosphate
  modified_base 21: mod_base = OTHER; note = 2'-O-methyluridine-3'-phosphate ((2S,4R)-1-[29-[[2-(acetylamino)-2-deoxy-beta-D-galactopyra nosyl]oxy]-14,14-bis[[3-[[3-[[5-[[2-(acetylamino)-2-deoxy-b eta-D-galactopyranosyl]oxy]-1-oxopentyl]amino]propyl]amino] -3-oxopropoxy]methyl]-1,12,19,25-tetraoxo-16-oxa-13,20,24-t riazanonacos-1-yl]-4-hydroxy-2-pyrrolidinyl)methyl ester
acttctaagtaaaaccacagt

SEQ ID NO: 1080 - RNA, 21 nt, synthetic construct
  source 1..21: mol_type = other RNA
  modified_base 1: mod_base = OTHER; note = 2'-O-methylguanosine-3'-phosphorothioate
  modified_base 2: mod_base = OTHER; note = 2'-O-methyluridine-3'-phosphorothioate
  modified_base 3: mod_base = OTHER; note = 2'-O-methyladenosine-3'-phosphate
  modified_base 4: mod_base = OTHER; note = 2'-O-methyladenosine-3'-phosphate
  modified_base 5: mod_base = OTHER; note = 2'-O-methyladenosine-3'-phosphate
  modified_base 6: mod_base = OTHER; note = 2'-O-methyladenosine-3'-phosphate
  modified_base 7: mod_base = OTHER; note = 2'-deoxy-2'-fluorocytidine-3'-phosphate
  modified_base 8: mod_base = OTHER; note = 2'-O-methylcytidine-3'-phosphate
  modified_base 9: mod_base = OTHER; note = 2'-deoxy-2'-fluoroadenosine-3'-phosphate
  modified_base 10: mod_base = OTHER; note = 2'-deoxy-2'-fluorocytidine-3'-phosphate
  modified_base 11: mod_base = OTHER; note = 2'-deoxy-2'-fluoroadenosine-3'-phosphate
  modified_base 12: mod_base = OTHER; note = 2'-O-methylguanosine-3'-phosphate
  modified_base 13: mod_base = OTHER; note = 2'-O-methylcytidine-3'-phosphate
  modified_base 14: mod_base = OTHER; note = 2'-O-methyladenosine-3'-phosphate
  modified_base 15: mod_base = OTHER; note = 2'-O-methylguanosine-3'-phosphate
  modified_base 16: mod_base = OTHER; note = 2'-O-methyluridine-3'-phosphate
  modified_base 17: mod_base = OTHER; note = 2'-O-methyluridine-3'-phosphate
  modified_base 18: mod_base = OTHER; note = 2'-O-methylguanosine-3'-phosphate
  modified_base 19: mod_base = OTHER; note = 2'-O-methyladenosine-3'-phosphate
  modified_base 20: mod_base = OTHER; note = 2'-O-methyladenosine-3'-phosphate
  modified_base 21: mod_base = OTHER; note = 2'-O-methyluridine-3'-phosphate ((2S,4R)-1-[29-[[2-(acetylamino)-2-deoxy-beta-D-galactopyra nosyl]oxy]-14,14-bis[[3-[[3-[[5-[[2-(acetylamino)-2-deoxy-b eta-D-galactopyranosyl]oxy]-1-oxopentyl]amino]propyl]amino] -3-oxopropoxy]methyl]-1,12,19,25-tetraoxo-16-oxa-13,20,24-t riazanonacos-1-yl]-4-hydroxy-2-pyrrolidinyl)methyl ester
gtaaaaccacagcagttgaat

SEQ ID NO: 1081 - RNA, 21 nt, synthetic construct
  source 1..21: mol_type = other RNA
  modified_base 1: mod_base = OTHER; note = 2'-O-methylcytidine-3'-phosphorothioate
  modified_base 2: mod_base = OTHER; note = 2'-O-methylcytidine-3'-phosphorothioate
  modified_base 3: mod_base = OTHER; note = 2'-O-methyladenosine-3'-phosphate
  modified_base 4: mod_base = OTHER; note = 2'-O-methylcytidine-3'-phosphate
  modified_base 5: mod_base = OTHER; note = 2'-O-methyladenosine-3'-phosphate
  modified_base 6: mod_base = OTHER; note = 2'-O-methylguanosine-3'-phosphate
  modified_base 7: mod_base = OTHER; note = 2'-deoxy-2'-fluorocytidine-3'-phosphate
  modified_base 8: mod_base = OTHER; note = 2'-O-methyladenosine-3'-phosphate
  modified_base 9: mod_base = OTHER; note = 2'-deoxy-2'-fluoroguanosine-3'-phosphate
  modified_base 10: mod_base = OTHER; note = 2'-deoxy-2'-fluorouridine-3'-phosphate
  modified_base 11: mod_base = OTHER; note = 2'-deoxy-2'-fluorouridine-3'-phosphate
  modified_base 12: mod_base = OTHER; note = 2'-O-methylguanosine-3'-phosphate
  modified_base 13: mod_base = OTHER; note = 2'-O-methyladenosine-3'-phosphate
  modified_base 14: mod_base = OTHER; note = 2'-O-methyladenosine-3'-phosphate
  modified_base 15: mod_base = OTHER; note = 2'-O-methyladenosine-3'-phosphate
  modified_base 16: mod_base = OTHER; note = 2'-O-methyladenosine-3'-phosphate
  modified_base 17: mod_base = OTHER; note = 2'-O-methylguanosine-3'-phosphate
  modified_base 18: mod_base = OTHER; note = 2'-O-methyladenosine-3'-phosphate
  modified_base 19: mod_base = OTHER; note = 2'-O-methylcytidine-3'-phosphate
  modified_base 20: mod_base = OTHER; note = 2'-O-methyluridine-3'-phosphate
  modified_base 21: mod_base = OTHER; note = 2'-O-methyluridine-3'-phosphate ((2S,4R)-1-[29-[[2-(acetylamino)-2-deoxy-beta-D-galactopyra nosyl]oxy]-14,14-bis[[3-[[3-[[5-[[2-(acetylamino)-2-deoxy-b eta-D-galactopyranosyl]oxy]-1-oxopentyl]amino]propyl]amino] -3-oxopropoxy]methyl]-1,12,19,25-tetraoxo-16-oxa-13,20,24-t riazanonacos-1-yl]-4-hydroxy-2-pyrrolidinyl)methyl ester
ccacagcagttgaaaagactt

SEQ ID NO: 1082 - RNA, 21 nt, synthetic construct
  source 1..21: mol_type = other RNA
  modified_base 1: mod_base = OTHER; note = 2'-O-methyluridine-3'-phosphorothioate
  modified_base 2: mod_base = OTHER; note = 2'-O-methyluridine-3'-phosphorothioate
  modified_base 3: mod_base = OTHER; note = 2'-O-methylguanosine-3'-phosphate
  modified_base 4: mod_base = OTHER; note = 2'-O-methyladenosine-3'-phosphate
  modified_base 5: mod_base = OTHER; note = 2'-O-methyladenosine-3'-phosphate
  modified_base 6: mod_base = OTHER; note = 2'-O-methyladenosine-3'-phosphate
  modified_base 7: mod_base = OTHER; note = 2'-deoxy-2'-fluoroadenosine-3'-phosphate
  modified_base 8: mod_base = OTHER; note = 2'-O-methylguanosine-3'-phosphate
  modified_base 9: mod_base = OTHER; note = 2'-deoxy-2'-fluoroadenosine-3'-phosphate
  modified_base 10: mod_base = OTHER; note = 2'-deoxy-2'-fluorocytidine-3'-phosphate
  modified_base 11: mod_base = OTHER; note = 2'-deoxy-2'-fluorouridine-3'-phosphate
  modified_base 12: mod_base = OTHER; note = 2'-O-methylcytidine-3'-phosphate
  modified_base 13: mod_base = OTHER; note = 2'-O-methylcytidine-3'-phosphate
  modified_base 14: mod_base = OTHER; note = 2'-O-methyladenosine-3'-phosphate
  modified_base 15: mod_base = OTHER; note = 2'-O-methyladenosine-3'-phosphate
  modified_base 16: mod_base = OTHER; note = 2'-O-methyladenosine-3'-phosphate
  modified_base 17: mod_base = OTHER; note = 2'-O-methylguanosine-3'-phosphate
  modified_base 18: mod_base = OTHER; note = 2'-O-methyladenosine-3'-phosphate
  modified_base 19: mod_base = OTHER; note = 2'-O-methyladenosine-3'-phosphate
  modified_base 20: mod_base = OTHER; note = 2'-O-methyladenosine-3'-phosphate
  modified_base 21: mod_base = OTHER; note = 2'-O-methyluridine-3'-phosphate ((2S,4R)-1-[29-[[2-(acetylamino)-2-deoxy-beta-D-galactopyra nosyl]oxy]-14,14-bis[[3-[[3-[[5-[[2-(acetylamino)-2-deoxy-b eta-D-galactopyranosyl]oxy]-1-oxopentyl]amino]propyl]amino] -3-oxopropoxy]methyl]-1,12,19,25-tetraoxo-16-oxa-13,20,24-t riazanonacos-1-yl]-4-hydroxy-2-pyrrolidinyl)methyl ester
ttgaaaagactccaaagaaat

SEQ ID NO: 1083 - RNA, 21 nt, synthetic construct
  source 1..21: mol_type = other RNA
  modified_base 1: mod_base = OTHER; note = 2'-O-methyladenosine-3'-phosphorothioate
  modified_base 2: mod_base = OTHER; note = 2'-O-methylguanosine-3'-phosphorothioate
  modified_base 3: mod_base = OTHER; note = 2'-O-methyladenosine-3'-phosphate
  modified_base 4: mod_base = OTHER; note = 2'-O-methylcytidine-3'-phosphate
  modified_base 5: mod_base = OTHER; note = 2'-O-methyluridine-3'-phosphate
  modified_base 6: mod_base = OTHER; note = 2'-O-methylcytidine-3'-phosphate
  modified_base 7: mod_base = OTHER; note = 2'-deoxy-2'-fluorocytidine-3'-phosphate
  modified_base 8: mod_base = OTHER; note = 2'-O-methyladenosine-3'-phosphate
  modified_base 9: mod_base = OTHER; note = 2'-deoxy-2'-fluoroadenosine-3'-phosphate
  modified_base 10: mod_base = OTHER; note = 2'-deoxy-2'-fluoroadenosine-3'-phosphate
  modified_base 11: mod_base = OTHER; note = 2'-deoxy-2'-fluoroguanosine-3'-phosphate
  modified_base 12: mod_base = OTHER; note = 2'-O-methyladenosine-3'-phosphate
  modified_base 13: mod_base = OTHER; note = 2'-O-methyladenosine-3'-phosphate
  modified_base 14: mod_base = OTHER; note = 2'-O-methyladenosine-3'-phosphate
  modified_base 15: mod_base = OTHER; note = 2'-O-methyluridine-3'-phosphate
  modified_base 16: mod_base = OTHER; note = 2'-O-methylguanosine-3'-phosphate
  modified_base 17: mod_base = OTHER; note = 2'-O-methyluridine-3'-phosphate
  modified_base 18: mod_base = OTHER; note = 2'-O-methyladenosine-3'-phosphate
  modified_base 19: mod_base = OTHER; note = 2'-O-methyladenosine-3'-phosphate
  modified_base 20: mod_base = OTHER; note = 2'-O-methylguanosine-3'-phosphate
  modified_base 21: mod_base = OTHER; note = 2'-O-methyluridine-3'-phosphate ((2S,4R)-1-[29-[[2-(acetylamino)-2-deoxy-beta-D-galactopyra nosyl]oxy]-14,14-bis[[3-[[3-[[5-[[2-(acetylamino)-2-deoxy-b eta-D-galactopyranosyl]oxy]-1-oxopentyl]amino]propyl]amino] -3-oxopropoxy]methyl]-1,12,19,25-tetraoxo-16-oxa-13,20,24-t riazanonacos-1-yl]-4-hydroxy-2-pyrrolidinyl)methyl ester
agactccaaagaaatgtaagt

SEQ ID NO: 1084 - RNA, 21 nt, synthetic construct
  source 1..21: mol_type = other RNA
  modified_base 1: mod_base = OTHER; note = 2'-O-methyladenosine-3'-phosphorothioate
  modified_base 2: mod_base = OTHER; note = 2'-O-methyladenosine-3'-phosphorothioate
  modified_base 3: mod_base = OTHER; note = 2'-O-methyladenosine-3'-phosphate
  modified_base 4: mod_base = OTHER; note = 2'-O-methylguanosine-3'-phosphate
  modified_base 5: mod_base = OTHER; note = 2'-O-methyladenosine-3'-phosphate
  modified_base 6: mod_base = OTHER; note = 2'-O-methyladenosine-3'-phosphate
  modified_base 7: mod_base = OTHER; note = 2'-deoxy-2'-fluoroadenosine-3'-phosphate
  modified_base 8: mod_base = OTHER; note = 2'-O-methyluridine-3'-phosphate
  modified_base 9: mod_base = OTHER; note = 2'-deoxy-2'-fluoroguanosine-3'-phosphate
  modified_base 10: mod_base = OTHER; note = 2'-deoxy-2'-fluorouridine-3'-phosphate
  modified_base 11: mod_base = OTHER; note = 2'-deoxy-2'-fluoroadenosine-3'-phosphate
  modified_base 12: mod_base = OTHER; note = 2'-O-methyladenosine-3'-phosphate
  modified_base 13: mod_base = OTHER; note = 2'-O-methylguanosine-3'-phosphate
  modified_base 14: mod_base = OTHER; note = 2'-O-methylguanosine-3'-phosphate
  modified_base 15: mod_base = OTHER; note = 2'-O-methylguanosine-3'-phosphate
  modified_base 16: mod_base = OTHER; note = 2'-O-methyladenosine-3'-phosphate
  modified_base 17: mod_base = OTHER; note = 2'-O-methyladenosine-3'-phosphate
  modified_base 18: mod_base = OTHER; note = 2'-O-methyladenosine-3'-phosphate
  modified_base 19: mod_base = OTHER; note = 2'-O-methylcytidine-3'-phosphate
  modified_base 20: mod_base = OTHER; note = 2'-O-methyluridine-3'-phosphate
  modified_base 21: mod_base = OTHER; note = 2'-O-methyluridine-3'-phosphate ((2S,4R)-1-[29-[[2-(acetylamino)-2-deoxy-beta-D-galactopyra nosyl]oxy]-14,14-bis[[3-[[3-[[5-[[2-(acetylamino)-2-deoxy-b eta-D-galactopyranosyl]oxy]-1-oxopentyl]amino]propyl]amino] -3-oxopropoxy]methyl]-1,12,19,25-tetraoxo-16-oxa-13,20,24-t riazanonacos-1-yl]-4-hydroxy-2-pyrrolidinyl)methyl ester
aaagaaatgtaagggaaactt

SEQ ID NO: 1085 - RNA, 21 nt, synthetic construct
  source 1..21: mol_type = other RNA
  modified_base 1: mod_base = OTHER; note = 2'-O-methyladenosine-3'-phosphorothioate
  modified_base 2: mod_base = OTHER; note = 2'-O-methyladenosine-3'-phosphorothioate
  modified_base 3: mod_base = OTHER; note = 2'-O-methylguanosine-3'-phosphate
  modified_base 4: mod_base = OTHER; note = 2'-O-methylguanosine-3'-phosphate
  modified_base 5: mod_base = OTHER; note = 2'-O-methylguanosine-3'-phosphate
  modified_base 6: mod_base = OTHER; note = 2'-O-methyladenosine-3'-phosphate
  modified_base 7: mod_base = OTHER; note = 2'-deoxy-2'-fluoroadenosine-3'-phosphate
  modified_base 8: mod_base = OTHER; note = 2'-O-methyladenosine-3'-phosphate
  modified_base 9: mod_base = OTHER; note = 2'-deoxy-2'-fluorocytidine-3'-phosphate
  modified_base 10: mod_base = OTHER; note = 2'-deoxy-2'-fluorouridine-3'-phosphate
  modified_base 11: mod_base = OTHER; note = 2'-deoxy-2'-fluoroguanosine-3'-phosphate
  modified_base 12: mod_base = OTHER; note = 2'-O-methylcytidine-3'-phosphate
  modified_base 13: mod_base = OTHER; note = 2'-O-methylcytidine-3'-phosphate
  modified_base 14: mod_base = OTHER; note = 2'-O-methyladenosine-3'-phosphate
  modified_base 15: mod_base = OTHER; note = 2'-O-methylguanosine-3'-phosphate
  modified_base 16: mod_base = OTHER; note = 2'-O-methylcytidine-3'-phosphate
  modified_base 17: mod_base = OTHER; note = 2'-O-methyladenosine-3'-phosphate
  modified_base 18: mod_base = OTHER; note = 2'-O-methyladenosine-3'-phosphate
  modified_base 19: mod_base = OTHER; note = 2'-O-methylcytidine-3'-phosphate
  modified_base 20: mod_base = OTHER; note = 2'-O-methylguanosine-3'-phosphate
  modified_base 21: mod_base = OTHER; note = 2'-O-methyluridine-3'-phosphate ((2S,4R)-1-[29-[[2-(acetylamino)-2-deoxy-beta-D-galactopyra nosyl]oxy]-14,14-bis[[3-[[3-[[5-[[2-(acetylamino)-2-deoxy-b eta-D-galactopyranosyl]oxy]-1-oxopentyl]amino]propyl]amino] -3-oxopropoxy]methyl]-1,12,19,25-tetraoxo-16-oxa-13,20,24-t riazanonacos-1-yl]-4-hydroxy-2-pyrrolidinyl)methyl ester
aagggaaactgccagcaacgt

SEQ ID NO: 1086 - RNA, 21 nt, synthetic construct
  source 1..21: mol_type = other RNA
  modified_base 1: mod_base = OTHER; note = 2'-O-methylguanosine-3'-phosphorothioate
  modified_base 2: mod_base = OTHER; note = 2'-O-methyluridine-3'-phosphorothioate
  modified_base 3: mod_base = OTHER; note = 2'-O-methylguanosine-3'-phosphate
  modified_base 4: mod_base = OTHER; note = 2'-O-methylcytidine-3'-phosphate
  modified_base 5: mod_base = OTHER; note = 2'-O-methylcytidine-3'-phosphate
  modified_base 6: mod_base = OTHER; note = 2'-O-methyladenosine-3'-phosphate
  modified_base 7: mod_base = OTHER; note = 2'-deoxy-2'-fluoroguanosine-3'-phosphate
  modified_base 8: mod_base = OTHER; note = 2'-O-methyluridine-3'-phosphate
  modified_base 9: mod_base = OTHER; note = 2'-deoxy-2'-fluorouridine-3'-phosphate
  modified_base 10: mod_base = OTHER; note = 2'-deoxy-2'-fluoroadenosine-3'-phosphate
  modified_base 11: mod_base = OTHER; note = 2'-deoxy-2'-fluorouridine-3'-phosphate
  modified_base 12: mod_base = OTHER; note = 2'-O-methylguanosine-3'-phosphate
  modified_base 13: mod_base = OTHER; note = 2'-O-methylguanosine-3'-phosphate
  modified_base 14: mod_base = OTHER; note = 2'-O-methylcytidine-3'-phosphate
  modified_base 15: mod_base = OTHER; note = 2'-O-methyluridine-3'-phosphate
  modified_base 16: mod_base = OTHER; note = 2'-O-methyladenosine-3'-phosphate
  modified_base 17: mod_base = OTHER; note = 2'-O-methyluridine-3'-phosphate
  modified_base 18: mod_base = OTHER; note = 2'-O-methyladenosine-3'-phosphate
  modified_base 19: mod_base = OTHER; note = 2'-O-methylguanosine-3'-phosphate
  modified_base 20: mod_base = OTHER; note = 2'-O-methylguanosine-3'-phosphate
  modified_base 21: mod_base = OTHER; note = 2'-O-methyluridine-3'-phosphate ((2S,4R)-1-[29-[[2-(acetylamino)-2-deoxy-beta-D-galactopyra nosyl]oxy]-14,14-bis[[3-[[3-[[5-[[2-(acetylamino)-2-deoxy-b eta-D-galactopyranosyl]oxy]-1-oxopentyl]amino]propyl]amino] -3-oxopropoxy]methyl]-1,12,19,25-tetraoxo-16-oxa-13,20,24-t riazanonacos-1-yl]-4-hydroxy-2-pyrrolidinyl)methyl ester
gtgccagttatggctataggt

SEQ ID NO: 1087 - RNA, 21 nt, synthetic construct
  source 1..21: mol_type = other RNA
  modified_base 1: mod_base = OTHER; note = 2'-O-methyladenosine-3'-phosphorothioate
  modified_base 2: mod_base = OTHER; note = 2'-O-methyluridine-3'-phosphorothioate
  modified_base 3: mod_base = OTHER; note = 2'-O-methylguanosine-3'-phosphate
  modified_base 4: mod_base = OTHER; note = 2'-O-methylguanosine-3'-phosphate
  modified_base 5: mod_base = OTHER; note = 2'-O-methylcytidine-3'-phosphate
  modified_base 6: mod_base = OTHER; note = 2'-O-methyluridine-3'-phosphate
  modified_base 7: mod_base = OTHER; note = 2'-deoxy-2'-fluoroadenosine-3'-phosphate
  modified_base 8: mod_base = OTHER; note = 2'-O-methyluridine-3'-phosphate
  modified_base 9: mod_base = OTHER; note = 2'-deoxy-2'-fluoroadenosine-3'-phosphate
  modified_base 10: mod_base = OTHER; note = 2'-deoxy-2'-fluoroguanosine-3'-phosphate
  modified_base 11: mod_base = OTHER; note = 2'-deoxy-2'-fluoroguanosine-3'-phosphate
  modified_base 12: mod_base = OTHER; note = 2'-O-methyluridine-3'-phosphate
  modified_base 13: mod_base = OTHER; note = 2'-O-methylguanosine-3'-phosphate
  modified_base 14: mod_base = OTHER; note = 2'-O-methylcytidine-3'-phosphate
  modified_base 15: mod_base = OTHER; note = 2'-O-methyluridine-3'-phosphate
  modified_base 16: mod_base = OTHER; note = 2'-O-methyladenosine-3'-phosphate
  modified_base 17: mod_base = OTHER; note = 2'-O-methylcytidine-3'-phosphate
  modified_base 18: mod_base = OTHER; note = 2'-O-methyladenosine-3'-phosphate
  modified_base 19: mod_base = OTHER; note = 2'-O-methyladenosine-3'-phosphate
  modified_base 20: mod_base = OTHER; note = 2'-O-methyladenosine-3'-phosphate
  modified_base 21: mod_base = OTHER; note = 2'-O-methyluridine-3'-phosphate ((2S,4R)-1-[29-[[2-(acetylamino)-2-deoxy-beta-D-galactopyra nosyl]oxy]-14,14-bis[[3-[[3-[[5-[[2-(acetylamino)-2-deoxy-b eta-D-galactopyranosyl]oxy]-1-oxopentyl]amino]propyl]amino] -3-oxopropoxy]methyl]-1,12,19,25-tetraoxo-16-oxa-13,20,24-t riazanonacos-1-yl]-4-hydroxy-2-pyrrolidinyl)methyl ester
atggctataggtgctacaaat

SEQ ID NO: 1088 - RNA, 21 nt, synthetic construct
  source 1..21: mol_type = other RNA
  modified_base 1: mod_base = OTHER; note = 2'-O-methyladenosine-3'-phosphorothioate
  modified_base 2: mod_base = OTHER; note = 2'-O-methylcytidine-3'-phosphorothioate
  modified_base 3: mod_base = OTHER; note = 2'-O-methyladenosine-3'-phosphate
  modified_base 4: mod_base = OTHER; note = 2'-O-methylguanosine-3'-phosphate
  modified_base 5: mod_base = OTHER; note = 2'-O-methylcytidine-3'-phosphate
  modified_base 6: mod_base = OTHER; note = 2'-O-methyladenosine-3'-phosphate
  modified_base 7: mod_base = OTHER; note = 2'-deoxy-2'-fluoroadenosine-3'-phosphate
  modified_base 8: mod_base = OTHER; note = 2'-O-methylguanosine-3'-phosphate
  modified_base 9: mod_base = OTHER; note = 2'-deoxy-2'-fluoroguanosine-3'-phosphate
  modified_base 10: mod_base = OTHER; note = 2'-deoxy-2'-fluoroguanosine-3'-phosphate
  modified_base 11: mod_base = OTHER; note = 2'-deoxy-2'-fluorouridine-3'-phosphate
  modified_base 12: mod_base = OTHER; note = 2'-O-methylguanosine-3'-phosphate
  modified_base 13: mod_base = OTHER; note = 2'-O-methyladenosine-3'-phosphate
  modified_base 14: mod_base = OTHER; note = 2'-O-methyluridine-3'-phosphate
  modified_base 15: mod_base = OTHER; note = 2'-O-methylguanosine-3'-phosphate
  modified_base 16: mod_base = OTHER; note = 2'-O-methylguanosine-3'-phosphate
  modified_base 17: mod_base = OTHER; note = 2'-O-methylguanosine-3'-phosphate
  modified_base 18: mod_base = OTHER; note = 2'-O-methyladenosine-3'-phosphate
  modified_base 19: mod_base = OTHER; note = 2'-O-methyladenosine-3'-phosphate
  modified_base 20: mod_base = OTHER; note = 2'-O-methyladenosine-3'-phosphate
  modified_base 21: mod_base = OTHER; note = 2'-O-methyluridine-3'-phosphate ((2S,4R)-1-[29-[[2-(acetylamino)-2-deoxy-beta-D-galactopyra nosyl]oxy]-14,14-bis[[3-[[3-[[5-[[2-(acetylamino)-2-deoxy-b eta-D-galactopyranosyl]oxy]-1-oxopentyl]amino]propyl]amino] -3-oxopropoxy]methyl]-1,12,19,25-tetraoxo-16-oxa-13,20,24-t riazanonacos-1-yl]-4-hydroxy-2-pyrrolidinyl)methyl ester
acagcaagggtgatgggaaat

SEQ ID NO: 1089 - RNA, 21 nt, synthetic construct
  source 1..21: mol_type = other RNA
  modified_base 1: mod_base = OTHER; note = 2'-O-methylguanosine-3'-phosphorothioate
  modified_base 2: mod_base = OTHER; note = 2'-O-methylguanosine-3'-phosphorothioate
  modified_base 3: mod_base = OTHER; note = 2'-O-methylguanosine-3'-phosphate
  modified_base 4: mod_base = OTHER; note = 2'-O-methyluridine-3'-phosphate
  modified_base 5: mod_base = OTHER; note = 2'-O-methylguanosine-3'-phosphate
  modified_base 6: mod_base = OTHER; note = 2'-O-methyladenosine-3'-phosphate
  modified_base 7: mod_base = OTHER; note = 2'-deoxy-2'-fluorouridine-3'-phosphate
  modified_base 8: mod_base = OTHER; note = 2'-O-methylguanosine-3'-phosphate
  modified_base 9: mod_base = OTHER; note = 2'-deoxy-2'-fluoroguanosine-3'-phosphate
  modified_base 10: mod_base = OTHER; note = 2'-deoxy-2'-fluoroguanosine-3'-phosphate
  modified_base 11: mod_base = OTHER; note = 2'-deoxy-2'-fluoroadenosine-3'-phosphate
  modified_base 12: mod_base = OTHER; note = 2'-O-methyladenosine-3'-phosphate
  modified_base 13: mod_base = OTHER; note = 2'-O-methyladenosine-3'-phosphate
  modified_base 14: mod_base = OTHER; note = 2'-O-methylguanosine-3'-phosphate
  modified_base 15: mod_base = OTHER; note = 2'-O-methylcytidine-3'-phosphate
  modified_base 16: mod_base = OTHER; note = 2'-O-methyladenosine-3'-phosphate
  modified_base 17: mod_base = OTHER; note = 2'-O-methyluridine-3'-phosphate
  modified_base 18: mod_base = OTHER; note = 2'-O-methyluridine-3'-phosphate
  modified_base 19: mod_base = OTHER; note = 2'-O-methylguanosine-3'-phosphate
  modified_base 20: mod_base = OTHER; note = 2'-O-methyluridine-3'-phosphate
  modified_base 21: mod_base = OTHER; note = 2'-O-methyluridine-3'-phosphate ((2S,4R)-1-[29-[[2-(acetylamino)-2-deoxy-beta-D-galactopyra nosyl]oxy]-14,14-bis[[3-[[3-[[5-[[2-(acetylamino)-2-deoxy-b eta-D-galactopyranosyl]oxy]-1-oxopentyl]amino]propyl]amino] -3-oxopropoxy]methyl]-1,12,19,25-tetraoxo-16-oxa-13,20,24-t riazanonacos-1-yl]-4-hydroxy-2-pyrrolidinyl)methyl ester
gggtgatgggaaagcattgtt

SEQ ID NO: 1090 - RNA, 21 nt, synthetic construct
  source 1..21: mol_type = other RNA
  modified_base 1: mod_base = OTHER; note = 2'-O-methyluridine-3'-phosphorothioate
  modified_base 2: mod_base = OTHER; note = 2'-O-methylguanosine-3'-phosphorothioate
  modified_base 3: mod_base = OTHER; note = 2'-O-methylguanosine-3'-phosphate
  modified_base 4: mod_base = OTHER; note = 2'-O-methylguanosine-3'-phosphate
  modified_base 5: mod_base = OTHER; note = 2'-O-methyladenosine-3'-phosphate
  modified_base 6: mod_base = OTHER; note = 2'-O-methyladenosine-3'-phosphate
  modified_base 7: mod_base = OTHER; note = 2'-deoxy-2'-fluoroadenosine-3'-phosphate
  modified_base 8: mod_base = OTHER; note = 2'-O-methylguanosine-3'-phosphate
  modified_base 9: mod_base = OTHER; note = 2'-deoxy-2'-fluorocytidine-3'-phosphate
  modified_base 10: mod_base = OTHER; note = 2'-deoxy-2'-fluoroadenosine-3'-phosphate
  modified_base 11: mod_base = OTHER; note = 2'-deoxy-2'-fluorouridine-3'-phosphate
  modified_base 12: mod_base = OTHER; note = 2'-O-methyluridine-3'-phosphate
  modified_base 13: mod_base = OTHER; note = 2'-O-methylguanosine-3'-phosphate
  modified_base 14: mod_base = OTHER; note = 2'-O-methyluridine-3'-phosphate
  modified_base 15: mod_base = OTHER; note = 2'-O-methyladenosine-3'-phosphate
  modified_base 16: mod_base = OTHER; note = 2'-O-methyladenosine-3'-phosphate
  modified_base 17: mod_base = OTHER; note = 2'-O-methyladenosine-3'-phosphate
  modified_base 18: mod_base = OTHER; note = 2'-O-methyluridine-3'-phosphate
  modified_base 19: mod_base = OTHER; note = 2'-O-methylguanosine-3'-phosphate
  modified_base 20: mod_base = OTHER; note = 2'-O-methyluridine-3'-phosphate
  modified_base 21: mod_base = OTHER; note = 2'-O-methyluridine-3'-phosphate ((2S,4R)-1-[29-[[2-(acetylamino)-2-deoxy-beta-D-galactopyra nosyl]oxy]-14,14-bis[[3-[[3-[[5-[[2-(acetylamino)-2-deoxy-b eta-D-galactopyranosyl]oxy]-1-oxopentyl]amino]propyl]amino] -3-oxopropoxy]methyl]-1,12,19,25-tetraoxo-16-oxa-13,20,24-t riazanonacos-1-yl]-4-hydroxy-2-pyrrolidinyl)methyl ester
tgggaaagcattgtaaatgtt

SEQ ID NO: 1091 - RNA, 21 nt, synthetic construct
  source 1..21: mol_type = other RNA
  modified_base 1: mod_base = OTHER; note = 2'-O-methyladenosine-3'-phosphorothioate
  modified_base 2: mod_base = OTHER; note = 2'-O-methylguanosine-3'-phosphorothioate
  modified_base 3: mod_base = OTHER; note = 2'-O-methylcytidine-3'-phosphate
  modified_base 4: mod_base = OTHER; note = 2'-O-methyladenosine-3'-phosphate
  modified_base 5: mod_base = OTHER; note = 2'-O-methyluridine-3'-phosphate
  modified_base 6: mod_base = OTHER; note = 2'-O-methyluridine-3'-phosphate
  modified_base 7: mod_base = OTHER; note = 2'-deoxy-2'-fluoroguanosine-3'-phosphate
  modified_base 8: mod_base = OTHER; note = 2'-O-methyluridine-3'-phosphate
  modified_base 9: mod_base = OTHER; note = 2'-deoxy-2'-fluoroadenosine-3'-phosphate
  modified_base 10: mod_base = OTHER; note = 2'-deoxy-2'-fluoroadenosine-3'-phosphate
  modified_base 11: mod_base = OTHER; note = 2'-deoxy-2'-fluoroadenosine-3'-phosphate
  modified_base 12: mod_base = OTHER; note = 2'-O-methyluridine-3'-phosphate
  modified_base 13: mod_base = OTHER; note = 2'-O-methylguanosine-3'-phosphate
  modified_base 14: mod_base = OTHER; note = 2'-O-methyluridine-3'-phosphate
  modified_base 15: mod_base = OTHER; note = 2'-O-methylguanosine-3'-phosphate
  modified_base 16: mod_base = OTHER; note = 2'-O-methylcytidine-3'-phosphate
  modified_base 17: mod_base = OTHER; note = 2'-O-methyluridine-3'-phosphate
  modified_base 18: mod_base = OTHER; note = 2'-O-methyluridine-3'-phosphate
  modified_base 19: mod_base = OTHER; note = 2'-O-methyluridine-3'-phosphate
  modified_base 20: mod_base = OTHER; note = 2'-O-methyluridine-3'-phosphate
  modified_base 21: mod_base = OTHER; note = 2'-O-methyluridine-3'-phosphate ((2S,4R)-1-[29-[[2-(acetylamino)-2-deoxy-beta-D-galactopyra nosyl]oxy]-14,14-bis[[3-[[3-[[5-[[2-(acetylamino)-2-deoxy-b eta-D-galactopyranosyl]oxy]-1-oxopentyl]amino]propyl]amino] -3-oxopropoxy]methyl]-1,12,19,25-tetraoxo-16-oxa-13,20,24-t riazanonacos-1-yl]-4-hydroxy-2-pyrrolidinyl)methyl ester
agcattgtaaatgtgcttttt

SEQ ID NO: 1092 - RNA, 21 nt, synthetic construct
  source 1..21: mol_type = other RNA
  modified_base 1: mod_base = OTHER; note = 2'-O-methyladenosine-3'-phosphorothioate
  modified_base 2: mod_base = OTHER; note = 2'-O-methylcytidine-3'-phosphorothioate
  modified_base 3: mod_base = OTHER; note = 2'-O-methyluridine-3'-phosphate
  modified_base 4: mod_base = OTHER; note = 2'-O-methylguanosine-3'-phosphate
  modified_base 5: mod_base = OTHER; note = 2'-O-methyladenosine-3'-phosphate
  modified_base 6: mod_base = OTHER; note = 2'-O-methyluridine-3'-phosphate
  modified_base 7: mod_base = OTHER; note = 2'-deoxy-2'-fluoroguanosine-3'-phosphate
  modified_base 8: mod_base = OTHER; note = 2'-O-methyluridine-3'-phosphate
  modified_base 9: mod_base = OTHER; note = 2'-deoxy-2'-fluorouridine-3'-phosphate
  modified_base 10: mod_base = OTHER; note = 2'-deoxy-2'-fluorocytidine-3'-phosphate
  modified_base 11: mod_base = OTHER; note = 2'-deoxy-2'-fluorocytidine-3'-phosphate
  modified_base 12: mod_base = OTHER; note = 2'-O-methyluridine-3'-phosphate
  modified_base 13: mod_base = OTHER; note = 2'-O-methyladenosine-3'-phosphate
  modified_base 14: mod_base = OTHER; note = 2'-O-methylguanosine-3'-phosphate
  modified_base 15: mod_base = OTHER; note = 2'-O-methyluridine-3'-phosphate
  modified_base 16: mod_base = OTHER; note = 2'-O-methylguanosine-3'-phosphate
  modified_base 17: mod_base = OTHER; note = 2'-O-methyladenosine-3'-phosphate
  modified_base 18: mod_base = OTHER; note = 2'-O-methyladenosine-3'-phosphate
  modified_base 19: mod_base = OTHER; note = 2'-O-methyladenosine-3'-phosphate
  modified_base 20: mod_base = OTHER; note = 2'-O-methylguanosine-3'-phosphate
  modified_base 21: mod_base = OTHER; note = 2'-O-methyluridine-3'-phosphate ((2S,4R)-1-[29-[[2-(acetylamino)-2-deoxy-beta-D-galactopyra nosyl]oxy]-14,14-bis[[3-[[3-[[5-[[2-(acetylamino)-2-deoxy-b eta-D-galactopyranosyl]oxy]-1-oxopentyl]amino]propyl]amino] -3-oxopropoxy]methyl]-1,12,19,25-tetraoxo-16-oxa-13,20,24-t riazanonacos-1-yl]-4-hydroxy-2-pyrrolidinyl)methyl ester
actgatgttcctagtgaaagt

SEQ ID NO: 1093 - RNA, 21 nt, synthetic construct
  source 1..21: mol_type = other RNA
  modified_base 1: mod_base = OTHER; note = 2'-O-methylguanosine-3'-phosphorothioate
  modified_base 2: mod_base = OTHER; note = 2'-O-methyluridine-3'-phosphorothioate
  modified_base 3: mod_base = OTHER; note = 2'-O-methyluridine-3'-phosphate
  modified_base 4: mod_base = OTHER; note = 2'-O-methylcytidine-3'-phosphate
  modified_base 5: mod_base = OTHER; note = 2'-O-methylcytidine-3'-phosphate
  modified_base 6: mod_base = OTHER; note = 2'-O-methyluridine-3'-phosphate
  modified_base 7: mod_base = OTHER; note = 2'-deoxy-2'-fluoroadenosine-3'-phosphate
  modified_base 8: mod_base = OTHER; note = 2'-O-methylguanosine-3'-phosphate
  modified_base 9: mod_base = OTHER; note = 2'-deoxy-2'-fluorouridine-3'-phosphate
  modified_base 10: mod_base = OTHER; note = 2'-deoxy-2'-fluoroguanosine-3'-phosphate
  modified_base 11: mod_base = OTHER; note = 2'-deoxy-2'-fluoroadenosine-3'-phosphate
  modified_base 12: mod_base = OTHER; note = 2'-O-methyladenosine-3'-phosphate
  modified_base 13: mod_base = OTHER; note = 2'-O-methyladenosine-3'-phosphate
  modified_base 14: mod_base = OTHER; note = 2'-O-methylguanosine-3'-phosphate
  modified_base 15: mod_base = OTHER; note = 2'-O-methyladenosine-3'-phosphate
  modified_base 16: mod_base = OTHER; note = 2'-O-methylguanosine-3'-phosphate
  modified_base 17: mod_base = OTHER; note = 2'-O-methylguanosine-3'-phosphate
  modified_base 18: mod_base = OTHER; note = 2'-O-methylcytidine-3'-phosphate
  modified_base 19: mod_base = OTHER; note = 2'-O-methyladenosine-3'-phosphate
  modified_base 20: mod_base = OTHER; note = 2'-O-methylguanosine-3'-phosphate
  modified_base 21: mod_base = OTHER; note = 2'-O-methyluridine-3'-phosphate ((2S,4R)-1-[29-[[2-(acetylamino)-2-deoxy-beta-D-galactopyra nosyl]oxy]-14,14-bis[[3-[[3-[[5-[[2-(acetylamino)-2-deoxy-b eta-D-galactopyranosyl]oxy]-1-oxopentyl]amino]propyl]amino] -3-oxopropoxy]methyl]-1,12,19,25-tetraoxo-16-oxa-13,20,24-t riazanonacos-1-yl]-4-hydroxy-2-pyrrolidinyl)methyl ester
gttcctagtgaaagaggcagt

SEQ ID NO: 1094 - RNA, 21 nt, synthetic construct
  source 1..21: mol_type = other RNA
  modified_base 1: mod_base = OTHER; note = 2'-O-methylguanosine-3'-phosphorothioate
  modified_base 2: mod_base = OTHER; note = 2'-O-methyluridine-3'-phosphorothioate
  modified_base 3: mod_base = OTHER; note = 2'-O-methylguanosine-3'-phosphate
  modified_base 4: mod_base = OTHER; note = 2'-O-methyladenosine-3'-phosphate
  modified_base 5: mod_base = OTHER; note = 2'-O-methyladenosine-3'-phosphate
  modified_base 6: mod_base = OTHER; note = 2'-O-methyladenosine-3'-phosphate
  modified_base 7: mod_base = OTHER; note = 2'-deoxy-2'-fluoroguanosine-3'-phosphate
  modified_base 8: mod_base = OTHER; note = 2'-O-methyladenosine-3'-phosphate
  modified_base 9: mod_base = OTHER; note = 2'-deoxy-2'-fluoroguanosine-3'-phosphate
  modified_base 10: mod_base = OTHER; note = 2'-deoxy-2'-fluoroguanosine-3'-phosphate
  modified_base 11: mod_base = OTHER; note = 2'-deoxy-2'-fluorocytidine-3'-phosphate
  modified_base 12: mod_base = OTHER; note = 2'-O-methyladenosine-3'-phosphate
  modified_base 13: mod_base = OTHER; note = 2'-O-methylguanosine-3'-phosphate
  modified_base 14: mod_base = OTHER; note = 2'-O-methylcytidine-3'-phosphate
  modified_base 15: mod_base = OTHER; note = 2'-O-methyluridine-3'-phosphate
  modified_base 16: mod_base = OTHER; note = 2'-O-methyluridine-3'-phosphate
  modified_base 17: mod_base = OTHER; note = 2'-O-methylguanosine-3'-phosphate
  modified_base 18: mod_base = OTHER; note = 2'-O-methyladenosine-3'-phosphate
  modified_base 19: mod_base = OTHER; note = 2'-O-methyladenosine-3'-phosphate
  modified_base 20: mod_base = OTHER; note = 2'-O-methyladenosine-3'-phosphate
  modified_base 21: mod_base = OTHER; note = 2'-O-methyluridine-3'-phosphate ((2S,4R)-1-[29-[[2-(acetylamino)-2-deoxy-beta-D-galactopyra nosyl]oxy]-14,14-bis[[3-[[3-[[5-[[2-(acetylamino)-2-deoxy-b eta-D-galactopyranosyl]oxy]-1-oxopentyl]amino]propyl]amino] -3-oxopropoxy]methyl]-1,12,19,25-tetraoxo-16-oxa-13,20,24-t riazanonacos-1-yl]-4-hydroxy-2-pyrrolidinyl)methyl ester
gtgaaagaggcagcttgaaat

SEQ ID NO: 1095 - RNA, 21 nt, synthetic construct
  source 1..21: mol_type = other RNA
  modified_base 1: mod_base = OTHER; note = 2'-O-methyladenosine-3'-phosphorothioate
  modified_base 2: mod_base = OTHER; note = 2'-O-methylguanosine-3'-phosphorothioate
  modified_base 3: mod_base = OTHER; note = 2'-O-methylguanosine-3'-phosphate
  modified_base 4: mod_base = OTHER; note = 2'-O-methylcytidine-3'-phosphate
  modified_base 5: mod_base = OTHER; note = 2'-O-methyladenosine-3'-phosphate
  modified_base 6: mod_base = OTHER; note = 2'-O-methylguanosine-3'-phosphate
  modified_base 7: mod_base = OTHER; note = 2'-deoxy-2'-fluorocytidine-3'-phosphate
  modified_base 8: mod_base = OTHER; note = 2'-O-methyluridine-3'-phosphate
  modified_base 9: mod_base = OTHER; note = 2'-deoxy-2'-fluorouridine-3'-phosphate
  modified_base 10: mod_base = OTHER; note = 2'-deoxy-2'-fluoroguanosine-3'-phosphate
  modified_base 11: mod_base = OTHER; note = 2'-deoxy-2'-fluoroadenosine-3'-phosphate
  modified_base 12: mod_base = OTHER; note = 2'-O-methyladenosine-3'-phosphate
  modified_base 13: mod_base = OTHER; note = 2'-O-methyladenosine-3'-phosphate
  modified_base 14: mod_base = OTHER; note = 2'-O-methylcytidine-3'-phosphate
  modified_base 15: mod_base = OTHER; note = 2'-O-methyluridine-3'-phosphate
  modified_base 16: mod_base = OTHER; note = 2'-O-methylguanosine-3'-phosphate
  modified_base 17: mod_base = OTHER; note = 2'-O-methyladenosine-3'-phosphate
  modified_base 18: mod_base = OTHER; note = 2'-O-methylguanosine-3'-phosphate
  modified_base 19: mod_base = OTHER; note = 2'-O-methyladenosine-3'-phosphate
  modified_base 20: mod_base = OTHER; note = 2'-O-methyluridine-3'-phosphate
  modified_base 21: mod_base = OTHER; note = 2'-O-methyluridine-3'-phosphate ((2S,4R)-1-[29-[[2-(acetylamino)-2-deoxy-beta-D-galactopyra nosyl]oxy]-14,14-bis[[3-[[3-[[5-[[2-(acetylamino)-2-deoxy-b eta-D-galactopyranosyl]oxy]-1-oxopentyl]amino]propyl]amino] -3-oxopropoxy]methyl]-1,12,19,25-tetraoxo-16-oxa-13,20,24-t riazanonacos-1-yl]-4-hydroxy-2-pyrrolidinyl)methyl ester
aggcagcttgaaactgagatt

SEQ ID NO: 1096 - RNA, 21 nt, synthetic construct
  source 1..21: mol_type = other RNA
  modified_base 1: mod_base = OTHER; note = 2'-O-methyladenosine-3'-phosphorothioate
  modified_base 2: mod_base = OTHER; note = 2'-O-methyladenosine-3'-phosphorothioate
  modified_base 3: mod_base = OTHER; note = 2'-O-methyladenosine-3'-phosphate
  modified_base 4: mod_base = OTHER; note = 2'-O-methylcytidine-3'-phosphate
  modified_base 5: mod_base = OTHER; note = 2'-O-methyluridine-3'-phosphate
  modified_base 6: mod_base = OTHER; note = 2'-O-methylguanosine-3'-phosphate
  modified_base 7: mod_base = OTHER; note = 2'-deoxy-2'-fluoroadenosine-3'-phosphate
  modified_base 8: mod_base = OTHER; note = 2'-O-methylguanosine-3'-phosphate
  modified_base 9: mod_base = OTHER; note = 2'-deoxy-2'-fluoroadenosine-3'-phosphate
  modified_base 10: mod_base = OTHER; note = 2'-deoxy-2'-fluorouridine-3'-phosphate
  modified_base 11: mod_base = OTHER; note = 2'-deoxy-2'-fluoroguanosine-3'-phosphate
  modified_base 12: mod_base = OTHER; note = 2'-O-methyluridine-3'-phosphate
  modified_base 13: mod_base = OTHER; note = 2'-O-methylguanosine-3'-phosphate
  modified_base 14: mod_base = OTHER; note = 2'-O-methyladenosine-3'-phosphate
  modified_base 15: mod_base = OTHER; note = 2'-O-methyladenosine-3'-phosphate
  modified_base 16: mod_base = OTHER; note = 2'-O-methylcytidine-3'-phosphate
  modified_base 17: mod_base = OTHER; note = 2'-O-methyladenosine-3'-phosphate
  modified_base 18: mod_base = OTHER; note = 2'-O-methylcytidine-3'-phosphate
  modified_base 19: mod_base = OTHER; note = 2'-O-methyladenosine-3'-phosphate
  modified_base 20: mod_base = OTHER; note = 2'-O-methyluridine-3'-phosphate
  modified_base 21: mod_base = OTHER; note = 2'-O-methyluridine-3'-phosphate ((2S,4R)-1-[29-[[2-(acetylamino)-2-deoxy-beta-D-galactopyra nosyl]oxy]-14,14-bis[[3-[[3-[[5-[[2-(acetylamino)-2-deoxy-b eta-D-galactopyranosyl]oxy]-1-oxopentyl]amino]propyl]amino] -3-oxopropoxy]methyl]-1,12,19,25-tetraoxo-16-oxa-13,20,24-t riazanonacos-1-yl]-4-hydroxy-2-pyrrolidinyl)methyl ester
aaactgagatgtgaacacatt

SEQ ID NO: 1097 - RNA, 21 nt, synthetic construct
  source 1..21: mol_type = other RNA
  modified_base 1: mod_base = OTHER; note = 2'-O-methyladenosine-3'-phosphorothioate
  modified_base 2: mod_base = OTHER; note = 2'-O-methylguanosine-3'-phosphorothioate
  modified_base 3: mod_base = OTHER; note = 2'-O-methyladenosine-3'-phosphate
  modified_base 4: mod_base = OTHER; note = 2'-O-methyluridine-3'-phosphate
  modified_base 5: mod_base = OTHER; note = 2'-O-methylguanosine-3'-phosphate
  modified_base 6: mod_base = OTHER; note = 2'-O-methyluridine-3'-phosphate
  modified_base 7: mod_base = OTHER; note = 2'-deoxy-2'-fluoroguanosine-3'-phosphate
  modified_base 8: mod_base = OTHER; note = 2'-O-methyladenosine-3'-phosphate
  modified_base 9: mod_base = OTHER; note = 2'-deoxy-2'-fluoroadenosine-3'-phosphate
  modified_base 10: mod_base = OTHER; note = 2'-deoxy-2'-fluorocytidine-3'-phosphate
  modified_base 11: mod_base = OTHER; note = 2'-deoxy-2'-fluoroadenosine-3'-phosphate
  modified_base 12: mod_base = OTHER; note = 2'-O-methylcytidine-3'-phosphate
  modified_base 13: mod_base = OTHER; note = 2'-O-methyladenosine-3'-phosphate
  modified_base 14: mod_base = OTHER; note = 2'-O-methyluridine-3'-phosphate
  modified_base 15: mod_base = OTHER; note = 2'-O-methylcytidine-3'-phosphate
  modified_base 16: mod_base = OTHER; note = 2'-O-methyladenosine-3'-phosphate
  modified_base 17: mod_base = OTHER; note = 2'-O-methylguanosine-3'-phosphate
  modified_base 18: mod_base = OTHER; note = 2'-O-methylcytidine-3'-phosphate
  modified_base 19: mod_base = OTHER; note = 2'-O-methyluridine-3'-phosphate
  modified_base 20: mod_base = OTHER; note = 2'-O-methyluridine-3'-phosphate
  modified_base 21: mod_base = OTHER; note = 2'-O-methyluridine-3'-phosphate ((2S,4R)-1-[29-[[2-(acetylamino)-2-deoxy-beta-D-galactopyra nosyl]oxy]-14,14-bis[[3-[[3-[[5-[[2-(acetylamino)-2-deoxy-b eta-D-galactopyranosyl]oxy]-1-oxopentyl]amino]propyl]amino] -3-oxopropoxy]methyl]-1,12,19,25-tetraoxo-16-oxa-13,20,24-t riazanonacos-1-yl]-4-hydroxy-2-pyrrolidinyl)methyl ester
agatgtgaacacatcagcttt

SEQ ID NO: 1098 - RNA, 21 nt, synthetic construct
  source 1..21: mol_type = other RNA
  modified_base 1: mod_base = OTHER; note = 2'-O-methylcytidine-3'-phosphorothioate
  modified_base 2: mod_base = OTHER; note = 2'-O-methyladenosine-3'-phosphorothioate
  modified_base 3: mod_base = OTHER; note = 2'-O-methyluridine-3'-phosphate
  modified_base 4: mod_base = OTHER; note = 2'-O-methylcytidine-3'-phosphate
  modified_base 5: mod_base = OTHER; note = 2'-O-methyladenosine-3'-phosphate
  modified_base 6: mod_base = OTHER; note = 2'-O-methylguanosine-3'-phosphate
  modified_base 7: mod_base = OTHER; note = 2'-deoxy-2'-fluorocytidine-3'-phosphate
  modified_base 8: mod_base = OTHER; note = 2'-O-methyluridine-3'-phosphate
  modified_base 9: mod_base = OTHER; note = 2'-deoxy-2'-fluorouridine-3'-phosphate
  modified_base 10: mod_base = OTHER; note = 2'-deoxy-2'-fluoroguanosine-3'-phosphate
  modified_base 11: mod_base = OTHER; note = 2'-deoxy-2'-fluorocytidine-3'-phosphate
  modified_base 12: mod_base = OTHER; note = 2'-O-methylcytidine-3'-phosphate
  modified_base 13: mod_base = OTHER; note = 2'-O-methylcytidine-3'-phosphate
  modified_base 14: mod_base = OTHER; note = 2'-O-methyluridine-3'-phosphate
  modified_base 15: mod_base = OTHER; note = 2'-O-methylguanosine-3'-phosphate
  modified_base 16: mod_base = OTHER; note = 2'-O-methyluridine-3'-phosphate
  modified_base 17: mod_base = OTHER; note = 2'-O-methyluridine-3'-phosphate
  modified_base 18: mod_base = OTHER; note = 2'-O-methyladenosine-3'-phosphate
  modified_base 19: mod_base = OTHER; note = 2'-O-methyladenosine-3'-phosphate
  modified_base 20: mod_base = OTHER; note = 2'-O-methyladenosine-3'-phosphate
  modified_base 21: mod_base = OTHER; note = 2'-O-methyluridine-3'-phosphate ((2S,4R)-1-[29-[[2-(acetylamino)-2-deoxy-beta-D-galactopyra nosyl]oxy]-14,14-bis[[3-[[3-[[5-[[2-(acetylamino)-2-deoxy-b eta-D-galactopyranosyl]oxy]-1-oxopentyl]amino]propyl]amino] -3-oxopropoxy]methyl]-1,12,19,25-tetraoxo-16-oxa-13,20,24-t riazanonacos-1-yl]-4-hydroxy-2-pyrrolidinyl)methyl ester
catcagcttgccctgttaaat

SEQ ID NO: 1099 - RNA, 21 nt, synthetic construct
  source 1..21: mol_type = other RNA
  modified_base 1: mod_base = OTHER; note = 2'-O-methylcytidine-3'-phosphorothioate
  modified_base 2: mod_base = OTHER; note = 2'-O-methyluridine-3'-phosphorothioate
  modified_base 3: mod_base = OTHER; note = 2'-O-methyluridine-3'-phosphate
  modified_base 4: mod_base = OTHER; note = 2'-O-methylguanosine-3'-phosphate
  modified_base 5: mod_base = OTHER; note = 2'-O-methylcytidine-3'-phosphate
  modified_base 6: mod_base = OTHER; note = 2'-O-methylcytidine-3'-phosphate
  modified_base 7: mod_base = OTHER; note = 2'-deoxy-2'-fluorocytidine-3'-phosphate
  modified_base 8: mod_base = OTHER; note = 2'-O-methyluridine-3'-phosphate
  modified_base 9: mod_base = OTHER; note = 2'-deoxy-2'-fluoroguanosine-3'-phosphate
  modified_base 10: mod_base = OTHER; note = 2'-deoxy-2'-fluorouridine-3'-phosphate
  modified_base 11: mod_base = OTHER; note = 2'-deoxy-2'-fluorouridine-3'-phosphate
  modified_base 12: mod_base = OTHER; note = 2'-O-methyladenosine-3'-phosphate
  modified_base 13: mod_base = OTHER; note = 2'-O-methyladenosine-3'-phosphate
  modified_base 14: mod_base = OTHER; note = 2'-O-methyladenosine-3'-phosphate
  modified_base 15: mod_base = OTHER; note = 2'-O-methyladenosine-3'-phosphate
  modified_base 16: mod_base = OTHER; note = 2'-O-methylguanosine-3'-phosphate
  modified_base 17: mod_base = OTHER; note = 2'-O-methyladenosine-3'-phosphate
  modified_base 18: mod_base = OTHER; note = 2'-O-methyluridine-3'-phosphate
  modified_base 19: mod_base = OTHER; note = 2'-O-methylguanosine-3'-phosphate
  modified_base 20: mod_base = OTHER; note = 2'-O-methyladenosine-3'-phosphate
  modified_base 21: mod_base = OTHER; note = 2'-O-methyluridine-3'-phosphate ((2S,4R)-1-[29-[[2-(acetylamino)-2-deoxy-beta-D-galactopyra nosyl]oxy]-14,14-bis[[3-[[3-[[5-[[2-(acetylamino)-2-deoxy-b eta-D-galactopyranosyl]oxy]-1-oxopentyl]amino]propyl]amino] -3-oxopropoxy]methyl]-1,12,19,25-tetraoxo-16-oxa-13,20,24-t riazanonacos-1-yl]-4-hydroxy-2-pyrrolidinyl)methyl ester
cttgccctgttaaaagatgat

SEQ ID NO: 1100 - RNA, 21 nt, synthetic construct
  source 1..21: mol_type = other RNA
  modified_base 1: mod_base = OTHER; note = 2'-O-methylguanosine-3'-phosphorothioate
  modified_base 2: mod_base = OTHER; note = 2'-O-methyluridine-3'-phosphorothioate
  modified_base 3: mod_base = OTHER; note = 2'-O-methyladenosine-3'-phosphate
  modified_base 4: mod_base = OTHER; note = 2'-O-methyluridine-3'-phosphate
  modified_base 5: mod_base = OTHER; note = 2'-O-methylcytidine-3'-phosphate
  modified_base 6: mod_base = OTHER; note = 2'-O-methyladenosine-3'-phosphate
  modified_base 7: mod_base = OTHER; note = 2'-deoxy-2'-fluorocytidine-3'-phosphate
  modified_base 8: mod_base = OTHER; note = 2'-O-methyladenosine-3'-phosphate
  modified_base 9: mod_base = OTHER; note = 2'-deoxy-2'-fluoroadenosine-3'-phosphate
  modified_base 10: mod_base = OTHER; note = 2'-deoxy-2'-fluoroadenosine-3'-phosphate
  modified_base 11: mod_base = OTHER; note = 2'-deoxy-2'-fluorouridine-3'-phosphate
  modified_base 12: mod_base = OTHER; note = 2'-O-methylcytidine-3'-phosphate
  modified_base 13: mod_base = OTHER; note = 2'-O-methyluridine-3'-phosphate
  modified_base 14: mod_base = OTHER; note = 2'-O-methyluridine-3'-phosphate
  modified_base 15: mod_base = OTHER; note = 2'-O-methyladenosine-3'-phosphate
  modified_base 16: mod_base = OTHER; note = 2'-O-methyladenosine-3'-phosphate
  modified_base 17: mod_base = OTHER; note = 2'-O-methylcytidine-3'-phosphate
  modified_base 18: mod_base = OTHER; note = 2'-O-methyluridine-3'-phosphate
  modified_base 19: mod_base = OTHER; note = 2'-O-methyluridine-3'-phosphate
  modified_base 20: mod_base = OTHER; note = 2'-O-methylguanosine-3'-phosphate
  modified_base 21: mod_base = OTHER; note = 2'-O-methyluridine-3'-phosphate ((2S,4R)-1-[29-[[2-(acetylamino)-2-deoxy-beta-D-galactopyra nosyl]oxy]-14,14-bis[[3-[[3-[[5-[[2-(acetylamino)-2-deoxy-b eta-D-galactopyranosyl]oxy]-1-oxopentyl]amino]propyl]amino] -3-oxopropoxy]methyl]-1,12,19,25-tetraoxo-16-oxa-13,20,24-t riazanonacos-1-yl]-4-hydroxy-2-pyrrolidinyl)methyl ester
gtatcacaaatcttaacttgt

SEQ ID NO: 1101 - RNA, 21 nt, synthetic construct
  source 1..21: mol_type = other RNA
  modified_base 1: mod_base = OTHER; note = 2'-O-methyladenosine-3'-phosphorothioate
  modified_base 2: mod_base = OTHER; note = 2'-O-methyladenosine-3'-phosphorothioate
  modified_base 3: mod_base = OTHER; note = 2'-O-methyladenosine-3'-phosphate
  modified_base 4: mod_base = OTHER; note = 2'-O-methyluridine-3'-phosphate
  modified_base 5: mod_base = OTHER; note = 2'-O-methylcytidine-3'-phosphate
  modified_base 6: mod_base = OTHER; note = 2'-O-methyluridine-3'-phosphate
  modified_base 7: mod_base = OTHER; note = 2'-deoxy-2'-fluorouridine-3'-phosphate
  modified_base 8: mod_base = OTHER; note = 2'-O-methyladenosine-3'-phosphate
  modified_base 9: mod_base = OTHER; note = 2'-deoxy-2'-fluoroadenosine-3'-phosphate
  modified_base 10: mod_base = OTHER; note = 2'-deoxy-2'-fluorocytidine-3'-phosphate
  modified_base 11: mod_base = OTHER; note = 2'-deoxy-2'-fluorouridine-3'-phosphate
  modified_base 12: mod_base = OTHER; note = 2'-O-methyluridine-3'-phosphate
  modified_base 13: mod_base = OTHER; note = 2'-O-methylguanosine-3'-phosphate
  modified_base 14: mod_base = OTHER; note = 2'-O-methyladenosine-3'-phosphate
  modified_base 15: mod_base = OTHER; note = 2'-O-methyladenosine-3'-phosphate
  modified_base 16: mod_base = OTHER; note = 2'-O-methylguanosine-3'-phosphate
  modified_base 17: mod_base = OTHER; note = 2'-O-methylguanosine-3'-phosphate
  modified_base 18: mod_base = OTHER; note = 2'-O-methyladenosine-3'-phosphate
  modified_base 19: mod_base = OTHER; note = 2'-O-methylguanosine-3'-phosphate
  modified_base 20: mod_base = OTHER; note = 2'-O-methyluridine-3'-phosphate
  modified_base 21: mod_base = OTHER; note = 2'-O-methyluridine-3'-phosphate ((2S,4R)-1-[29-[[2-(acetylamino)-2-deoxy-beta-D-galactopyra nosyl]oxy]-14,14-bis[[3-[[3-[[5-[[2-(acetylamino)-2-deoxy-b eta-D-galactopyranosyl]oxy]-1-oxopentyl]amino]propyl]amino] -3-oxopropoxy]methyl]-1,12,19,25-tetraoxo-16-oxa-13,20,24-t riazanonacos-1-yl]-4-hydroxy-2-pyrrolidinyl)methyl ester
aaatcttaacttgaaggagtt

SEQ ID NO: 1102 - RNA, 21 nt, synthetic construct
  source 1..21: mol_type = other RNA
  modified_base 1: mod_base = OTHER; note = 2'-O-methyladenosine-3'-phosphorothioate
  modified_base 2: mod_base = OTHER; note = 2'-O-methyladenosine-3'-phosphorothioate
  modified_base 3: mod_base = OTHER; note = 2'-O-methylcytidine-3'-phosphate
  modified_base 4: mod_base = OTHER; note = 2'-O-methyluridine-3'-phosphate
  modified_base 5: mod_base = OTHER; note = 2'-O-methyluridine-3'-phosphate
  modified_base 6: mod_base = OTHER; note = 2'-O-methylguanosine-3'-phosphate
  modified_base 7: mod_base = OTHER; note = 2'-deoxy-2'-fluoroadenosine-3'-phosphate
  modified_base 8: mod_base = OTHER; note = 2'-O-methyladenosine-3'-phosphate
  modified_base 9: mod_base = OTHER; note = 2'-deoxy-2'-fluoroguanosine-3'-phosphate
  modified_base 10: mod_base = OTHER; note = 2'-deoxy-2'-fluoroguanosine-3'-phosphate
  modified_base 11: mod_base = OTHER; note = 2'-deoxy-2'-fluoroadenosine-3'-phosphate
  modified_base 12: mod_base = OTHER; note = 2'-O-methylguanosine-3'-phosphate
  modified_base 13: mod_base = OTHER; note = 2'-O-methyluridine-3'-phosphate
  modified_base 14: mod_base = OTHER; note = 2'-O-methylcytidine-3'-phosphate
  modified_base 15: mod_base = OTHER; note = 2'-O-methylcytidine-3'-phosphate
  modified_base 16: mod_base = OTHER; note = 2'-O-methyluridine-3'-phosphate
  modified_base 17: mod_base = OTHER; note = 2'-O-methyluridine-3'-phosphate
  modified_base 18: mod_base = OTHER; note = 2'-O-methylguanosine-3'-phosphate
  modified_base 19: mod_base = OTHER; note = 2'-O-methylcytidine-3'-phosphate
  modified_base 20: mod_base = OTHER; note = 2'-O-methyladenosine-3'-phosphate
  modified_base 21: mod_base = OTHER; note = 2'-O-methyluridine-3'-phosphate ((2S,4R)-1-[29-[[2-(acetylamino)-2-deoxy-beta-D-galactopyra nosyl]oxy]-14,14-bis[[3-[[3-[[5-[[2-(acetylamino)-2-deoxy-b eta-D-galactopyranosyl]oxy]-1-oxopentyl]amino]propyl]amino] -3-oxopropoxy]methyl]-1,12,19,25-tetraoxo-16-oxa-13,20,24-t riazanonacos-1-yl]-4-hydroxy-2-pyrrolidinyl)methyl ester
aacttgaaggagtccttgcat

SEQ ID NO: 1103 - RNA, 21 nt, synthetic construct
  source 1..21: mol_type = other RNA
  modified_base 1: mod_base = OTHER; note = 2'-O-methyladenosine-3'-phosphorothioate
  modified_base 2: mod_base = OTHER; note = 2'-O-methyladenosine-3'-phosphorothioate
  modified_base 3: mod_base = OTHER; note = 2'-O-methylguanosine-3'-phosphate
  modified_base 4: mod_base = OTHER; note = 2'-O-methylguanosine-3'-phosphate
  modified_base 5: mod_base = OTHER; note = 2'-O-methyladenosine-3'-phosphate
  modified_base 6: mod_base = OTHER; note = 2'-O-methylguanosine-3'-phosphate
  modified_base 7: mod_base = OTHER; note = 2'-deoxy-2'-fluorouridine-3'-phosphate
  modified_base 8: mod_base = OTHER; note = 2'-O-methylcytidine-3'-phosphate
  modified_base 9: mod_base = OTHER; note = 2'-deoxy-2'-fluorocytidine-3'-phosphate
  modified_base 10: mod_base = OTHER; note = 2'-deoxy-2'-fluorouridine-3'-phosphate
  modified_base 11: mod_base = OTHER; note = 2'-deoxy-2'-fluorouridine-3'-phosphate
  modified_base 12: mod_base = OTHER; note = 2'-O-methylguanosine-3'-phosphate
  modified_base 13: mod_base = OTHER; note = 2'-O-methylcytidine-3'-phosphate
  modified_base 14: mod_base = OTHER; note = 2'-O-methyladenosine-3'-phosphate
  modified_base 15: mod_base = OTHER; note = 2'-O-methyluridine-3'-phosphate
  modified_base 16: mod_base = OTHER; note = 2'-O-methylcytidine-3'-phosphate
  modified_base 17: mod_base = OTHER; note = 2'-O-methyladenosine-3'-phosphate
  modified_base 18: mod_base = OTHER; note = 2'-O-methyladenosine-3'-phosphate
  modified_base 19: mod_base = OTHER; note = 2'-O-methyluridine-3'-phosphate
  modified_base 20: mod_base = OTHER; note = 2'-O-methyluridine-3'-phosphate
  modified_base 21: mod_base = OTHER; note = 2'-O-methyluridine-3'-phosphate ((2S,4R)-1-[29-[[2-(acetylamino)-2-deoxy-beta-D-galactopyra nosyl]oxy]-14,14-bis[[3-[[3-[[5-[[2-(acetylamino)-2-deoxy-b eta-D-galactopyranosyl]oxy]-1-oxopentyl]amino]propyl]amino] -3-oxopropoxy]methyl]-1,12,19,25-tetraoxo-16-oxa-13,20,24-t riazanonacos-1-yl]-4-hydroxy-2-pyrrolidinyl)methyl ester
aaggagtccttgcatcaattt

SEQ ID NO: 1104 - RNA, 21 nt, synthetic construct
  source 1..21: mol_type = other RNA
  modified_base 1: mod_base = OTHER; note = 2'-O-methyluridine-3'-phosphorothioate
  modified_base 2: mod_base = OTHER; note = 2'-O-methylcytidine-3'-phosphorothioate
  modified_base 3: mod_base = OTHER; note = 2'-O-methylcytidine-3'-phosphate
  modified_base 4: mod_base = OTHER; note = 2'-O-methyluridine-3'-phosphate
  modified_base 5: mod_base = OTHER; note = 2'-O-methyluridine-3'-phosphate
  modified_base 6: mod_base = OTHER; note = 2'-O-methylguanosine-3'-phosphate
  modified_base 7: mod_base = OTHER; note = 2'-deoxy-2'-fluorocytidine-3'-phosphate
  modified_base 8: mod_base = OTHER; note = 2'-O-methyladenosine-3'-phosphate
  modified_base 9: mod_base = OTHER; note = 2'-deoxy-2'-fluorouridine-3'-phosphate
  modified_base 10: mod_base = OTHER; note = 2'-deoxy-2'-fluorocytidine-3'-phosphate
  modified_base 11: mod_base = OTHER; note = 2'-deoxy-2'-fluoroadenosine-3'-phosphate
  modified_base 12: mod_base = OTHER; note = 2'-O-methyladenosine-3'-phosphate
  modified_base 13: mod_base = OTHER; note = 2'-O-methyluridine-3'-phosphate
  modified_base 14: mod_base = OTHER; note = 2'-O-methyluridine-3'-phosphate
  modified_base 15: mod_base = OTHER; note = 2'-O-methyluridine-3'-phosphate
  modified_base 16: mod_base = OTHER; note = 2'-O-methyluridine-3'-phosphate
  modified_base 17: mod_base = OTHER; note = 2'-O-methyluridine-3'-phosphate
  modified_base 18: mod_base = OTHER; note = 2'-O-methylcytidine-3'-phosphate
  modified_base 19: mod_base = OTHER; note = 2'-O-methyluridine-3'-phosphate
  modified_base 20: mod_base = OTHER; note = 2'-O-methyluridine-3'-phosphate
  modified_base 21: mod_base = OTHER; note = 2'-O-methyluridine-3'-phosphate ((2S,4R)-1-[29-[[2-(acetylamino)-2-deoxy-beta-D-galactopyra nosyl]oxy]-14,14-bis[[3-[[3-[[5-[[2-(acetylamino)-2-deoxy-b eta-D-galactopyranosyl]oxy]-1-oxopentyl]amino]propyl]amino] -3-oxopropoxy]methyl]-1,12,19,25-tetraoxo-16-oxa-13,20,24-t riazanonacos-1-yl]-4-hydroxy-2-pyrrolidinyl)methyl ester
tccttgcatcaatttttcttt

SEQ ID NO: 1105 - RNA, 21 nt, synthetic construct
  source 1..21: mol_type = other RNA
  modified_base 1: mod_base = OTHER; note = 2'-O-methyluridine-3'-phosphorothioate
  modified_base 2: mod_base = OTHER; note = 2'-O-methyluridine-3'-phosphorothioate
  modified_base 3: mod_base = OTHER; note = 2'-O-methyladenosine-3'-phosphate
  modified_base 4: mod_base = OTHER; note = 2'-O-methyluridine-3'-phosphate
  modified_base 5: mod_base = OTHER; note = 2'-O-methyluridine-3'-phosphate
  modified_base 6: mod_base = OTHER; note = 2'-O-methyluridine-3'-phosphate
  modified_base 7: mod_base = OTHER; note = 2'-deoxy-2'-fluorocytidine-3'-phosphate
  modified_base 8: mod_base = OTHER; note = 2'-O-methyladenosine-3'-phosphate
  modified_base 9: mod_base = OTHER; note = 2'-deoxy-2'-fluorouridine-3'-phosphate
  modified_base 10: mod_base = OTHER; note = 2'-deoxy-2'-fluorouridine-3'-phosphate
  modified_base 11: mod_base = OTHER; note = 2'-deoxy-2'-fluorouridine-3'-phosphate
  modified_base 12: mod_base = OTHER; note = 2'-O-methylcytidine-3'-phosphate
  modified_base 13: mod_base = OTHER; note = 2'-O-methyluridine-3'-phosphate
  modified_base 14: mod_base = OTHER; note = 2'-O-methyluridine-3'-phosphate
  modified_base 15: mod_base = OTHER; note = 2'-O-methyluridine-3'-phosphate
  modified_base 16: mod_base = OTHER; note = 2'-O-methylguanosine-3'-phosphate
  modified_base 17: mod_base = OTHER; note = 2'-O-methyladenosine-3'-phosphate
  modified_base 18: mod_base = OTHER; note = 2'-O-methylguanosine-3'-phosphate
  modified_base 19: mod_base = OTHER; note = 2'-O-methyluridine-3'-phosphate
  modified_base 20: mod_base = OTHER; note = 2'-O-methylguanosine-3'-phosphate
  modified_base 21: mod_base = OTHER; note = 2'-O-methyluridine-3'-phosphate ((2S,4R)-1-[29-[[2-(acetylamino)-2-deoxy-beta-D-galactopyra nosyl]oxy]-14,14-bis[[3-[[3-[[5-[[2-(acetylamino)-2-deoxy-b eta-D-galactopyranosyl]oxy]-1-oxopentyl]amino]propyl]amino] -3-oxopropoxy]methyl]-1,12,19,25-tetraoxo-16-oxa-13,20,24-t riazanonacos-1-yl]-4-hydroxy-2-pyrrolidinyl)methyl ester
ttatttcatttctttgagtgt

SEQ ID NO: 1106 - RNA, 21 nt, synthetic construct
  source 1..21: mol_type = other RNA
  modified_base 1: mod_base = OTHER; note = 2'-O-methyladenosine-3'-phosphorothioate
  modified_base 2: mod_base = OTHER; note = 2'-O-methyluridine-3'-phosphorothioate
  modified_base 3: mod_base = OTHER; note = 2'-O-methyluridine-3'-phosphate
  modified_base 4: mod_base = OTHER; note = 2'-O-methyluridine-3'-phosphate
  modified_base 5: mod_base = OTHER; note = 2'-O-methylcytidine-3'-phosphate
  modified_base 6: mod_base = OTHER; note = 2'-O-methyluridine-3'-phosphate
  modified_base 7: mod_base = OTHER; note = 2'-deoxy-2'-fluorouridine-3'-phosphate
  modified_base 8: mod_base = OTHER; note = 2'-O-methyluridine-3'-phosphate
  modified_base 9: mod_base = OTHER; note = 2'-deoxy-2'-fluoroguanosine-3'-phosphate
  modified_base 10: mod_base = OTHER; note = 2'-deoxy-2'-fluoroadenosine-3'-phosphate
  modified_base 11: mod_base = OTHER; note = 2'-deoxy-2'-fluoroguanosine-3'-phosphate
  modified_base 12: mod_base = OTHER; note = 2'-O-methyluridine-3'-phosphate
  modified_base 13: mod_base = OTHER; note = 2'-O-methylguanosine-3'-phosphate
  modified_base 14: mod_base = OTHER; note = 2'-O-methyluridine-3'-phosphate
  modified_base 15: mod_base = OTHER; note = 2'-O-methylcytidine-3'-phosphate
  modified_base 16: mod_base = OTHER; note = 2'-O-methyluridine-3'-phosphate
  modified_base 17: mod_base = OTHER; note = 2'-O-methyluridine-3'-phosphate
  modified_base 18: mod_base = OTHER; note = 2'-O-methyladenosine-3'-phosphate
  modified_base 19: mod_base = OTHER; note = 2'-O-methyladenosine-3'-phosphate
  modified_base 20: mod_base = OTHER; note = 2'-O-methyluridine-3'-phosphate
  modified_base 21: mod_base = OTHER; note = 2'-O-methyluridine-3'-phosphate ((2S,4R)-1-[29-[[2-(acetylamino)-2-deoxy-beta-D-galactopyra nosyl]oxy]-14,14-bis[[3-[[3-[[5-[[2-(acetylamino)-2-deoxy-b eta-D-galactopyranosyl]oxy]-1-oxopentyl]amino]propyl]amino] -3-oxopropoxy]methyl]-1,12,19,25-tetraoxo-16-oxa-13,20,24-t riazanonacos-1-yl]-4-hydroxy-2-pyrrolidinyl)methyl ester
atttctttgagtgtcttaatt

SEQ ID NO: 1107 - RNA, 21 nt, synthetic construct
  source 1..21: mol_type = other RNA
  modified_base 1: mod_base = OTHER; note = 2'-O-methyluridine-3'-phosphorothioate
  modified_base 2: mod_base = OTHER; note = 2'-O-methyluridine-3'-phosphorothioate
  modified_base 3: mod_base = OTHER; note = 2'-O-methylguanosine-3'-phosphate
  modified_base 4: mod_base = OTHER; note = 2'-O-methyladenosine-3'-phosphate
  modified_base 5: mod_base = OTHER; note = 2'-O-methylguanosine-3'-phosphate
  modified_base 6: mod_base = OTHER; note = 2'-O-methyluridine-3'-phosphate
  modified_base 7: mod_base = OTHER; note = 2'-deoxy-2'-fluoroguanosine-3'-phosphate
  modified_base 8: mod_base = OTHER; note = 2'-O-methyluridine-3'-phosphate
  modified_base 9: mod_base = OTHER; note = 2'-deoxy-2'-fluorocytidine-3'-phosphate
  modified_base 10: mod_base = OTHER; note = 2'-deoxy-2'-fluorouridine-3'-phosphate
  modified_base 11: mod_base = OTHER; note = 2'-deoxy-2'-fluorouridine-3'-phosphate
  modified_base 12: mod_base = OTHER; note = 2'-O-methyladenosine-3'-phosphate
  modified_base 13: mod_base = OTHER; note = 2'-O-methyladenosine-3'-phosphate
  modified_base 14: mod_base = OTHER; note = 2'-O-methyluridine-3'-phosphate
  modified_base 15: mod_base = OTHER; note = 2'-O-methyluridine-3'-phosphate
  modified_base 16: mod_base = OTHER; note = 2'-O-methyladenosine-3'-phosphate
  modified_base 17: mod_base = OTHER; note = 2'-O-methyladenosine-3'-phosphate
  modified_base 18: mod_base = OTHER; note = 2'-O-methyladenosine-3'-phosphate
  modified_base 19: mod_base = OTHER; note = 2'-O-methyladenosine-3'-phosphate
  modified_base 20: mod_base = OTHER; note = 2'-O-methylguanosine-3'-phosphate
  modified_base 21: mod_base = OTHER; note = 2'-O-methyluridine-3'-phosphate ((2S,4R)-1-[29-[[2-(acetylamino)-2-deoxy-beta-D-galactopyra nosyl]oxy]-14,14-bis[[3-[[3-[[5-[[2-(acetylamino)-2-deoxy-b eta-D-galactopyranosyl]oxy]-1-oxopentyl]amino]propyl]amino] -3-oxopropoxy]methyl]-1,12,19,25-tetraoxo-16-oxa-13,20,24-t riazanonacos-1-yl]-4-hydroxy-2-pyrrolidinyl)methyl ester
ttgagtgtcttaattaaaagt

SEQ ID NO: 1108 - RNA, 21 nt, synthetic construct
  source 1..21: mol_type = other RNA
  modified_base 1: mod_base = OTHER; note = 2'-O-methylguanosine-3'-phosphorothioate
  modified_base 2: mod_base = OTHER; note = 2'-O-methyladenosine-3'-phosphorothioate
  modified_base 3: mod_base = OTHER; note = 2'-O-methyladenosine-3'-phosphate
  modified_base 4: mod_base = OTHER; note = 2'-O-methyluridine-3'-phosphate
  modified_base 5: mod_base = OTHER; note = 2'-O-methyladenosine-3'-phosphate
  modified_base 6: mod_base = OTHER; note = 2'-O-methyluridine-3'-phosphate
  modified_base 7: mod_base = OTHER; note = 2'-deoxy-2'-fluorouridine-3'-phosphate
  modified_base 8: mod_base = OTHER; note = 2'-O-methyluridine-3'-phosphate
  modified_base 9: mod_base = OTHER; note = 2'-deoxy-2'-fluorouridine-3'-phosphate
  modified_base 10: mod_base = OTHER; note = 2'-deoxy-2'-fluoroadenosine-3'-phosphate
  modified_base 11: mod_base = OTHER; note = 2'-deoxy-2'-fluoroadenosine-3'-phosphate
  modified_base 12: mod_base = OTHER; note = 2'-O-methylcytidine-3'-phosphate
  modified_base 13: mod_base = OTHER; note = 2'-O-methyluridine-3'-phosphate
  modified_base 14: mod_base = OTHER; note = 2'-O-methyluridine-3'-phosphate
  modified_base 15: mod_base = OTHER; note = 2'-O-methylcytidine-3'-phosphate
  modified_base 16: mod_base = OTHER; note = 2'-O-methylcytidine-3'-phosphate
  modified_base 17: mod_base = OTHER; note = 2'-O-methyluridine-3'-phosphate
  modified_base 18: mod_base = OTHER; note = 2'-O-methyluridine-3'-phosphate
  modified_base 19: mod_base = OTHER; note = 2'-O-methylguanosine-3'-phosphate
  modified_base 20: mod_base = OTHER; note = 2'-O-methylguanosine-3'-phosphate
  modified_base 21: mod_base = OTHER; note = 2'-O-methyluridine-3'-phosphate ((2S,4R)-1-[29-[[2-(acetylamino)-2-deoxy-beta-D-galactopyra nosyl]oxy]-14,14-bis[[3-[[3-[[5-[[2-(acetylamino)-2-deoxy-b eta-D-galactopyranosyl]oxy]-1-oxopentyl]amino]propyl]amino] -3-oxopropoxy]methyl]-1,12,19,25-tetraoxo-16-oxa-13,20,24-t riazanonacos-1-yl]-4-hydroxy-2-pyrrolidinyl)methyl ester
gaatattttaacttccttggt

SEQ ID NO: 1109 - RNA, 21 nt, synthetic construct
  source 1..21: mol_type = other RNA
  modified_base 1: mod_base = OTHER; note = 2'-O-methyluridine-3'-phosphorothioate
  modified_base 2: mod_base = OTHER; note = 2'-O-methyluridine-3'-phosphorothioate
  modified_base 3: mod_base = OTHER; note = 2'-O-methyluridine-3'-phosphate
  modified_base 4: mod_base = OTHER; note = 2'-O-methyladenosine-3'-phosphate
  modified_base 5: mod_base = OTHER; note = 2'-O-methyladenosine-3'-phosphate
  modified_base 6: mod_base = OTHER; note = 2'-O-methylcytidine-3'-phosphate
  modified_base 7: mod_base = OTHER; note = 2'-deoxy-2'-fluorouridine-3'-phosphate
  modified_base 8: mod_base = OTHER; note = 2'-O-methyluridine-3'-phosphate
  modified_base 9: mod_base = OTHER; note = 2'-deoxy-2'-fluorocytidine-3'-phosphate
  modified_base 10: mod_base = OTHER; note = 2'-deoxy-2'-fluorocytidine-3'-phosphate
  modified_base 11: mod_base = OTHER; note = 2'-deoxy-2'-fluorouridine-3'-phosphate
  modified_base 12: mod_base = OTHER; note = 2'-O-methyluridine-3'-phosphate
  modified_base 13: mod_base = OTHER; note = 2'-O-methylguanosine-3'-phosphate
  modified_base 14: mod_base = OTHER; note = 2'-O-methylguanosine-3'-phosphate
  modified_base 15: mod_base = OTHER; note = 2'-O-methyladenosine-3'-phosphate
  modified_base 16: mod_base = OTHER; note = 2'-O-methylcytidine-3'-phosphate
  modified_base 17: mod_base = OTHER; note = 2'-O-methyluridine-3'-phosphate
  modified_base 18: mod_base = OTHER; note = 2'-O-methylcytidine-3'-phosphate
  modified_base 19: mod_base = OTHER; note = 2'-O-methyladenosine-3'-phosphate
  modified_base 20: mod_base = OTHER; note = 2'-O-methyluridine-3'-phosphate
  modified_base 21: mod_base = OTHER; note = 2'-O-methyluridine-3'-phosphate ((2S,4R)-1-[29-[[2-(acetylamino)-2-deoxy-beta-D-galactopyra nosyl]oxy]-14,14-bis[[3-[[3-[[5-[[2-(acetylamino)-2-deoxy-b eta-D-galactopyranosyl]oxy]-1-oxopentyl]amino]propyl]amino] -3-oxopropoxy]methyl]-1,12,19,25-tetraoxo-16-oxa-13,20,24-t riazanonacos-1-yl]-4-hydroxy-2-pyrrolidinyl)methyl ester
tttaacttccttggactcatt

SEQ ID NO: 1110 - RNA, 21 nt, synthetic construct
  source 1..21: mol_type = other RNA
  modified_base 1: mod_base = OTHER; note = 2'-O-methyluridine-3'-phosphorothioate
  modified_base 2: mod_base = OTHER; note = 2'-O-methyluridine-3'-phosphorothioate
  modified_base 3: mod_base = OTHER; note = 2'-O-methylcytidine-3'-phosphate
  modified_base 4: mod_base = OTHER; note = 2'-O-methylcytidine-3'-phosphate
  modified_base 5: mod_base = OTHER; note = 2'-O-methyluridine-3'-phosphate
  modified_base 6: mod_base = OTHER; note = 2'-O-methyluridine-3'-phosphate
  modified_base 7: mod_base = OTHER; note = 2'-deoxy-2'-fluoroguanosine-3'-phosphate
  modified_base 8: mod_base = OTHER; note = 2'-O-methylguanosine-3'-phosphate
  modified_base 9: mod_base = OTHER; note = 2'-deoxy-2'-fluoroadenosine-3'-phosphate
  modified_base 10: mod_base = OTHER; note = 2'-deoxy-2'-fluorocytidine-3'-phosphate
  modified_base 11: mod_base = OTHER; note = 2'-deoxy-2'-fluorouridine-3'-phosphate
  modified_base 12: mod_base = OTHER; note = 2'-O-methylcytidine-3'-phosphate
  modified_base 13: mod_base = OTHER; note = 2'-O-methyladenosine-3'-phosphate
  modified_base 14: mod_base = OTHER; note = 2'-O-methyluridine-3'-phosphate
  modified_base 15: mod_base = OTHER; note = 2'-O-methyluridine-3'-phosphate
  modified_base 16: mod_base = OTHER; note = 2'-O-methyluridine-3'-phosphate
  modified_base 17: mod_base = OTHER; note = 2'-O-methyluridine-3'-phosphate
  modified_base 18: mod_base = OTHER; note = 2'-O-methyladenosine-3'-phosphate
  modified_base 19: mod_base = OTHER; note = 2'-O-methyladenosine-3'-phosphate
  modified_base 20: mod_base = OTHER; note = 2'-O-methyladenosine-3'-phosphate
  modified_base 21: mod_base = OTHER; note = 2'-O-methyluridine-3'-phosphate ((2S,4R)-1-[29-[[2-(acetylamino)-2-deoxy-beta-D-galactopyra nosyl]oxy]-14,14-bis[[3-[[3-[[5-[[2-(acetylamino)-2-deoxy-b eta-D-galactopyranosyl]oxy]-1-oxopentyl]amino]propyl]amino] -3-oxopropoxy]methyl]-1,12,19,25-tetraoxo-16-oxa-13,20,24-t riazanonacos-1-yl]-4-hydroxy-2-pyrrolidinyl)methyl ester
ttccttggactcattttaaat

SEQ ID NO: 1111 - RNA, 21 nt, synthetic construct
  source 1..21: mol_type = other RNA
  modified_base 1: mod_base = OTHER; note = 2'-O-methyluridine-3'-phosphorothioate
  modified_base 2: mod_base = OTHER; note = 2'-O-methyladenosine-3'-phosphorothioate
  modified_base 3: mod_base = OTHER; note = 2'-O-methyluridine-3'-phosphate
  modified_base 4: mod_base = OTHER; note = 2'-O-methyluridine-3'-phosphate
  modified_base 5: mod_base = OTHER; note = 2'-O-methyladenosine-3'-phosphate
  modified_base 6: mod_base = OTHER; note = 2'-O-methyluridine-3'-phosphate
  modified_base 7: mod_base = OTHER; note = 2'-deoxy-2'-fluorouridine-3'-phosphate
  modified_base 8: mod_base = OTHER; note = 2'-O-methyladenosine-3'-phosphate
  modified_base 9: mod_base = OTHER; note = 2'-deoxy-2'-fluorouridine-3'-phosphate
  modified_base 10: mod_base = OTHER; note = 2'-deoxy-2'-fluorouridine-3'-phosphate
  modified_base 11: mod_base = OTHER; note = 2'-deoxy-2'-fluorocytidine-3'-phosphate
  modified_base 12: mod_base = OTHER; note = 2'-O-methylcytidine-3'-phosphate
  modified_base 13: mod_base = OTHER; note = 2'-O-methylcytidine-3'-phosphate
  modified_base 14: mod_base = OTHER; note = 2'-O-methyladenosine-3'-phosphate
  modified_base 15: mod_base = OTHER; note = 2'-O-methyluridine-3'-phosphate
  modified_base 16: mod_base = OTHER; note = 2'-O-methyluridine-3'-phosphate
  modified_base 17: mod_base = OTHER; note = 2'-O-methylcytidine-3'-phosphate
  modified_base 18: mod_base = OTHER; note = 2'-O-methyluridine-3'-phosphate
  modified_base 19: mod_base = OTHER; note = 2'-O-methyladenosine-3'-phosphate
  modified_base 20: mod_base = OTHER; note = 2'-O-methylcytidine-3'-phosphate
  modified_base 21: mod_base = OTHER; note = 2'-O-methyluridine-3'-phosphate ((2S,4R)-1-[29-[[2-(acetylamino)-2-deoxy-beta-D-galactopyra nosyl]oxy]-14,14-bis[[3-[[3-[[5-[[2-(acetylamino)-2-deoxy-b eta-D-galactopyranosyl]oxy]-1-oxopentyl]amino]propyl]amino] -3-oxopropoxy]methyl]-1,12,19,25-tetraoxo-16-oxa-13,20,24-t riazanonacos-1-yl]-4-hydroxy-2-pyrrolidinyl)methyl ester
tattattattcccattctact

SEQ ID NO: 1112 - RNA, 21 nt, synthetic construct
  source 1..21: mol_type = other RNA
  modified_base 1: mod_base = OTHER; note = 2'-O-methyladenosine-3'-phosphorothioate
  modified_base 2: mod_base = OTHER; note = 2'-O-methyluridine-3'-phosphorothioate
  modified_base 3: mod_base = OTHER; note = 2'-O-methyluridine-3'-phosphate
  modified_base 4: mod_base = OTHER; note = 2'-O-methylcytidine-3'-phosphate
  modified_base 5: mod_base = OTHER; note = 2'-O-methylcytidine-3'-phosphate
  modified_base 6: mod_base = OTHER; note = 2'-O-methylcytidine-3'-phosphate
  modified_base 7: mod_base = OTHER; note = 2'-deoxy-2'-fluoroadenosine-3'-phosphate
  modified_base 8: mod_base = OTHER; note = 2'-O-methyluridine-3'-phosphate
  modified_base 9: mod_base = OTHER; note = 2'-deoxy-2'-fluorouridine-3'-phosphate
  modified_base 10: mod_base = OTHER; note = 2'-deoxy-2'-fluorocytidine-3'-phosphate
  modified_base 11: mod_base = OTHER; note = 2'-deoxy-2'-fluorouridine-3'-phosphate
  modified_base 12: mod_base = OTHER; note = 2'-O-methyladenosine-3'-phosphate
  modified_base 13: mod_base = OTHER; note = 2'-O-methylcytidine-3'-phosphate
  modified_base 14: mod_base = OTHER; note = 2'-O-methyladenosine-3'-phosphate
  modified_base 15: mod_base = OTHER; note = 2'-O-methyluridine-3'-phosphate
  modified_base 16: mod_base = OTHER; note = 2'-O-methyladenosine-3'-phosphate
  modified_base 17: mod_base = OTHER; note = 2'-O-methylcytidine-3'-phosphate
  modified_base 18: mod_base = OTHER; note = 2'-O-methyluridine-3'-phosphate
  modified_base 19: mod_base = OTHER; note = 2'-O-methyladenosine-3'-phosphate
  modified_base 20: mod_base = OTHER; note = 2'-O-methyluridine-3'-phosphate
  modified_base 21: mod_base = OTHER; note = 2'-O-methyluridine-3'-phosphate ((2S,4R)-1-[29-[[2-(acetylamino)-2-deoxy-beta-D-galactopyra nosyl]oxy]-14,14-bis[[3-[[3-[[5-[[2-(acetylamino)-2-deoxy-b eta-D-galactopyranosyl]oxy]-1-oxopentyl]amino]propyl]amino] -3-oxopropoxy]methyl]-1,12,19,25-tetraoxo-16-oxa-13,20,24-t riazanonacos-1-yl]-4-hydroxy-2-pyrrolidinyl)methyl ester
attcccattctacatactatt

SEQ ID NO: 1113 - RNA, 21 nt, synthetic construct
  source 1..21: mol_type = other RNA
  modified_base 1: mod_base = OTHER; note = 2'-O-methylcytidine-3'-phosphorothioate
  modified_base 2: mod_base = OTHER; note = 2'-O-methyluridine-3'-phosphorothioate
  modified_base 3: mod_base = OTHER; note = 2'-O-methyladenosine-3'-phosphate
  modified_base 4: mod_base = OTHER; note = 2'-O-methylcytidine-3'-phosphate
  modified_base 5: mod_base = OTHER; note = 2'-O-methyladenosine-3'-phosphate
  modified_base 6: mod_base = OTHER; note = 2'-O-methyluridine-3'-phosphate
  modified_base 7: mod_base = OTHER; note = 2'-deoxy-2'-fluoroadenosine-3'-phosphate
  modified_base 8: mod_base = OTHER; note = 2'-O-methylcytidine-3'-phosphate
  modified_base 9: mod_base = OTHER; note = 2'-deoxy-2'-fluorouridine-3'-phosphate
  modified_base 10: mod_base = OTHER; note = 2'-deoxy-2'-fluoroadenosine-3'-phosphate
  modified_base 11: mod_base = OTHER; note = 2'-deoxy-2'-fluorouridine-3'-phosphate
  modified_base 12: mod_base = OTHER; note = 2'-O-methylguanosine-3'-phosphate
  modified_base 13: mod_base = OTHER; note = 2'-O-methylguanosine-3'-phosphate
  modified_base 14: mod_base = OTHER; note = 2'-O-methyladenosine-3'-phosphate
  modified_base 15: mod_base = OTHER; note = 2'-O-methyladenosine-3'-phosphate
  modified_base 16: mod_base = OTHER; note = 2'-O-methyluridine-3'-phosphate
  modified_base 17: mod_base = OTHER; note = 2'-O-methyluridine-3'-phosphate
  modified_base 18: mod_base = OTHER; note = 2'-O-methyluridine-3'-phosphate
  modified_base 19: mod_base = OTHER; note = 2'-O-methylcytidine-3'-phosphate
  modified_base 20: mod_base = OTHER; note = 2'-O-methyluridine-3'-phosphate
  modified_base 21: mod_base = OTHER; note = 2'-O-methyluridine-3'-phosphate ((2S,4R)-1-[29-[[2-(acetylamino)-2-deoxy-beta-D-galactopyra nosyl]oxy]-14,14-bis[[3-[[3-[[5-[[2-(acetylamino)-2-deoxy-b eta-D-galactopyranosyl]oxy]-1-oxopentyl]amino]propyl]amino] -3-oxopropoxy]methyl]-1,12,19,25-tetraoxo-16-oxa-13,20,24-t riazanonacos-1-yl]-4-hydroxy-2-pyrrolidinyl)methyl ester
ctacatactatggaatttctt

SEQ ID NO: 1114 - RNA, 21 nt, synthetic construct
  source 1..21: mol_type = other RNA
  modified_base 1: mod_base = OTHER; note = 2'-O-methyluridine-3'-phosphorothioate
  modified_base 2: mod_base = OTHER; note = 2'-O-methylguanosine-3'-phosphorothioate
  modified_base 3: mod_base = OTHER; note = 2'-O-methylguanosine-3'-phosphate
  modified_base 4: mod_base = OTHER; note = 2'-O-methyladenosine-3'-phosphate
  modified_base 5: mod_base = OTHER; note = 2'-O-methyladenosine-3'-phosphate
  modified_base 6: mod_base = OTHER; note = 2'-O-methyluridine-3'-phosphate
  modified_base 7: mod_base = OTHER; note = 2'-deoxy-2'-fluorouridine-3'-phosphate
  modified_base 8: mod_base = OTHER; note = 2'-O-methyluridine-3'-phosphate
  modified_base 9: mod_base = OTHER; note = 2'-deoxy-2'-fluorocytidine-3'-phosphate
  modified_base 10: mod_base = OTHER; note = 2'-deoxy-2'-fluorouridine-3'-phosphate
  modified_base 11: mod_base = OTHER; note = 2'-deoxy-2'-fluorocytidine-3'-phosphate
  modified_base 12: mod_base = OTHER; note = 2'-O-methylcytidine-3'-phosphate
  modified_base 13: mod_base = OTHER; note = 2'-O-methylcytidine-3'-phosphate
  modified_base 14: mod_base = OTHER; note = 2'-O-methyladenosine-3'-phosphate
  modified_base 15: mod_base = OTHER; note = 2'-O-methylguanosine-3'-phosphate
  modified_base 16: mod_base = OTHER; note = 2'-O-methyluridine-3'-phosphate
  modified_base 17: mod_base = OTHER; note = 2'-O-methylcytidine-3'-phosphate
  modified_base 18: mod_base = OTHER; note = 2'-O-methyladenosine-3'-phosphate
  modified_base 19: mod_base = OTHER; note = 2'-O-methyluridine-3'-phosphate
  modified_base 20: mod_base = OTHER; note = 2'-O-methyluridine-3'-phosphate
  modified_base 21: mod_base = OTHER; note = 2'-O-methyluridine-3'-phosphate ((2S,4R)-1-[29-[[2-(acetylamino)-2-deoxy-beta-D-galactopyra nosyl]oxy]-14,14-bis[[3-[[3-[[5-[[2-(acetylamino)-2-deoxy-b eta-D-galactopyranosyl]oxy]-1-oxopentyl]amino]propyl]amino] -3-oxopropoxy]methyl]-1,12,19,25-tetraoxo-16-oxa-13,20,24-t riazanonacos-1-yl]-4-hydroxy-2-pyrrolidinyl)methyl ester
tggaatttctcccagtcattt

SEQ ID NO: 1115 - RNA, 21 nt, synthetic construct
  source 1..21: mol_type = other RNA
  modified_base 1: mod_base = OTHER; note = 2'-O-methylcytidine-3'-phosphorothioate
  modified_base 2: mod_base = OTHER; note = 2'-O-methylcytidine-3'-phosphorothioate
  modified_base 3: mod_base = OTHER; note = 2'-O-methylcytidine-3'-phosphate
  modified_base 4: mod_base = OTHER; note = 2'-O-methyladenosine-3'-phosphate
  modified_base 5: mod_base = OTHER; note = 2'-O-methylguanosine-3'-phosphate
  modified_base 6: mod_base = OTHER; note = 2'-O-methyluridine-3'-phosphate
  modified_base 7: mod_base = OTHER; note = 2'-deoxy-2'-fluorocytidine-3'-phosphate
  modified_base 8: mod_base = OTHER; note = 2'-O-methyladenosine-3'-phosphate
  modified_base 9: mod_base = OTHER; note = 2'-deoxy-2'-fluorouridine-3'-phosphate
  modified_base 10: mod_base = OTHER; note = 2'-deoxy-2'-fluorouridine-3'-phosphate
  modified_base 11: mod_base = OTHER; note = 2'-deoxy-2'-fluorouridine-3'-phosphate
  modified_base 12: mod_base = OTHER; note = 2'-O-methyladenosine-3'-phosphate
  modified_base 13: mod_base = OTHER; note = 2'-O-methyladenosine-3'-phosphate
  modified_base 14: mod_base = OTHER; note = 2'-O-methyluridine-3'-phosphate
  modified_base 15: mod_base = OTHER; note = 2'-O-methyladenosine-3'-phosphate
  modified_base 16: mod_base = OTHER; note = 2'-O-methyladenosine-3'-phosphate
  modified_base 17: mod_base = OTHER; note = 2'-O-methyladenosine-3'-phosphate
  modified_base 18: mod_base = OTHER; note = 2'-O-methyluridine-3'-phosphate
  modified_base 19: mod_base = OTHER; note = 2'-O-methylguanosine-3'-phosphate
  modified_base 20: mod_base = OTHER; note = 2'-O-methyluridine-3'-phosphate
  modified_base 21: mod_base = OTHER; note = 2'-O-methyluridine-3'-phosphate ((2S,4R)-1-[29-[[2-(acetylamino)-2-deoxy-beta-D-galactopyra nosyl]oxy]-14,14-bis[[3-[[3-[[5-[[2-(acetylamino)-2-deoxy-b eta-D-galactopyranosyl]oxy]-1-oxopentyl]amino]propyl]amino] -3-oxopropoxy]methyl]-1,12,19,25-tetraoxo-16-oxa-13,20,24-t riazanonacos-1-yl]-4-hydroxy-2-pyrrolidinyl)methyl ester
cccagtcatttaataaatgtt

SEQ ID NO: 1116 - RNA, 21 nt, synthetic construct
  source 1..21: mol_type = other RNA
  modified_base 1: mod_base = OTHER; note = 2'-O-methylcytidine-3'-phosphorothioate
  modified_base 2: mod_base = OTHER; note = 2'-O-methyladenosine-3'-phosphorothioate
  modified_base 3: mod_base = OTHER; note = 2'-O-methyluridine-3'-phosphate
  modified_base 4: mod_base = OTHER; note = 2'-O-methyluridine-3'-phosphate
  modified_base 5: mod_base = OTHER; note = 2'-O-methyluridine-3'-phosphate
  modified_base 6: mod_base = OTHER; note = 2'-O-methyladenosine-3'-phosphate
  modified_base 7: mod_base = OTHER; note = 2'-deoxy-2'-fluoroadenosine-3'-phosphate
  modified_base 8: mod_base = OTHER; note = 2'-O-methyluridine-3'-phosphate
  modified_base 9: mod_base = OTHER; note = 2'-deoxy-2'-fluoroadenosine-3'-phosphate
  modified_base 10: mod_base = OTHER; note = 2'-deoxy-2'-fluoroadenosine-3'-phosphate
  modified_base 11: mod_base = OTHER; note = 2'-deoxy-2'-fluoroadenosine-3'-phosphate
  modified_base 12: mod_base = OTHER; note = 2'-O-methyluridine-3'-phosphate
  modified_base 13: mod_base = OTHER; note = 2'-O-methylguanosine-3'-phosphate
  modified_base 14: mod_base = OTHER; note = 2'-O-methyluridine-3'-phosphate
  modified_base 15: mod_base = OTHER; note = 2'-O-methylguanosine-3'-phosphate
  modified_base 16: mod_base = OTHER; note = 2'-O-methylcytidine-3'-phosphate
  modified_base 17: mod_base = OTHER; note = 2'-O-methylcytidine-3'-phosphate
  modified_base 18: mod_base = OTHER; note = 2'-O-methyluridine-3'-phosphate
  modified_base 19: mod_base = OTHER; note = 2'-O-methyluridine-3'-phosphate
  modified_base 20: mod_base = OTHER; note = 2'-O-methylcytidine-3'-phosphate
  modified_base 21: mod_base = OTHER; note = 2'-O-methyluridine-3'-phosphate ((2S,4R)-1-[29-[[2-(acetylamino)-2-deoxy-beta-D-galactopyra nosyl]oxy]-14,14-bis[[3-[[3-[[5-[[2-(acetylamino)-2-deoxy-b eta-D-galactopyranosyl]oxy]-1-oxopentyl]amino]propyl]amino] -3-oxopropoxy]methyl]-1,12,19,25-tetraoxo-16-oxa-13,20,24-t riazanonacos-1-yl]-4-hydroxy-2-pyrrolidinyl)methyl ester
catttaataaatgtgccttct

SEQ ID NO: 1117 - RNA, 23 nt, synthetic construct
  source 1..23: mol_type = other RNA
  modified_base 1: mod_base = OTHER; note = 2'-O-methyladenosine-3'-phosphorothioate
  modified_base 2: mod_base = OTHER; note = 2'-deoxy-2'-fluoroadenosine-3'-phosphorothioate
  modified_base 3: mod_base = OTHER; note = 2'-O-methylguanosine-3'-phosphate
  modified_base 4: mod_base = OTHER; note = 2'-O-methyluridine-3'-phosphate
  modified_base 5: mod_base = OTHER; note = 2'-O-methyluridine-3'-phosphate
  modified_base 6: mod_base = OTHER; note = 2'-deoxy-2'-fluoroadenosine-3'-phosphate
  modified_base 7: mod_base = OTHER; note = 2'-O-methyladenosine-3'-phosphate
  modified_base 8: mod_base = OTHER; note = 2'-deoxy-2'-fluoroadenosine-3'-phosphate
  modified_base 9: mod_base = OTHER; note = 2'-deoxy-2'-fluorocytidine-3'-phosphate
  modified_base 10: mod_base = OTHER; note = 2'-O-methyladenosine-3'-phosphate
  modified_base 11: mod_base = OTHER; note = 2'-O-methyluridine-3'-phosphate
  modified_base 12: mod_base = OTHER; note = 2'-O-methyluridine-3'-phosphate
  modified_base 13: mod_base = OTHER; note = 2'-O-methyladenosine-3'-phosphate
  modified_base 14: mod_base = OTHER; note = 2'-deoxy-2'-fluoroguanosine-3'-phosphate
  modified_base 15: mod_base = OTHER; note = 2'-O-methyluridine-3'-phosphate
  modified_base 16: mod_base = OTHER; note = 2'-deoxy-2'-fluoroguanosine-3'-phosphate
  modified_base 17: mod_base = OTHER; note = 2'-O-methyladenosine-3'-phosphate
  modified_base 18: mod_base = OTHER; note = 2'-O-methylguanosine-3'-phosphate
  modified_base 19: mod_base = OTHER; note = 2'-O-methylcytidine-3'-phosphate
  modified_base 20: mod_base = OTHER; note = 2'-O-methylguanosine-3'-phosphate
  modified_base 21: mod_base = OTHER; note = 2'-O-methylcytidine-3'-phosphorothioate
  modified_base 22: mod_base = OTHER; note = 2'-O-methylcytidine-3'-phosphorothioate
  modified_base 23: mod_base = OTHER; note = 2'-O-methylguanosine
aagttaaacattagtgagcgccg

SEQ ID NO: 1118 - RNA, 23 nt, synthetic construct
  source 1..23: mol_type = other RNA
  modified_base 1: mod_base = OTHER; note = 2'-O-methyladenosine-3'-phosphorothioate
  modified_base 2: mod_base = OTHER; note = 2'-deoxy-2'-fluoroadenosine-3'-phosphorothioate
  modified_base 3: mod_base = OTHER; note = 2'-O-methylguanosine-3'-phosphate
  modified_base 4: mod_base = OTHER; note = 2'-O-methyluridine-3'-phosphate
  modified_base 5: mod_base = OTHER; note = 2'-O-methylcytidine-3'-phosphate
  modified_base 6: mod_base = OTHER; note = 2'-deoxy-2'-fluoroadenosine-3'-phosphate
  modified_base 7: mod_base = OTHER; note = 2'-O-methylcytidine-3'-phosphate
  modified_base 8: mod_base = OTHER; note = 2'-deoxy-2'-fluorouridine-3'-phosphate
  modified_base 9: mod_base = OTHER; note = 2'-deoxy-2'-fluorocytidine-3'-phosphate
  modified_base 10: mod_base = OTHER; note = 2'-O-methylguanosine-3'-phosphate
  modified_base 11: mod_base = OTHER; note = 2'-O-methylcytidine-3'-phosphate
  modified_base 12: mod_base = OTHER; note = 2'-O-methylcytidine-3'-phosphate
  modified_base 13: mod_base = OTHER; note = 2'-O-methylguanosine-3'-phosphate
  modified_base 14: mod_base = OTHER; note = 2'-deoxy-2'-fluorocytidine-3'-phosphate
  modified_base 15: mod_base = OTHER; note = 2'-O-methyluridine-3'-phosphate
  modified_base 16: mod_base = OTHER; note = 2'-deoxy-2'-fluoroguanosine-3'-phosphate
  modified_base 17: mod_base = OTHER; note = 2'-O-methylguanosine-3'-phosphate
  modified_base 18: mod_base = OTHER; note = 2'-O-methylcytidine-3'-phosphate
  modified_base 19: mod_base = OTHER; note = 2'-O-methyladenosine-3'-phosphate
  modified_base 20: mod_base = OTHER; note = 2'-O-methyladenosine-3'-phosphate
  modified_base 21: mod_base = OTHER; note = 2'-O-methylguanosine-3'-phosphorothioate
  modified_base 22: mod_base = OTHER; note = 2'-O-methyluridine-3'-phosphorothioate
  modified_base 23: mod_base = OTHER; note = 2'-O-methyluridine
aagtcactcgccgctggcaagtt

SEQ ID NO: 1119 - RNA, 23 nt, synthetic construct
  source 1..23: mol_type = other RNA
  modified_base 1: mod_base = OTHER; note = 2'-O-methyladenosine-3'-phosphorothioate
  modified_base 2: mod_base = OTHER; note = 2'-deoxy-2'-fluoroguanosine-3'-phosphorothioate
  modified_base 3: mod_base = OTHER; note = 2'-O-methyladenosine-3'-phosphate
  modified_base 4: mod_base = OTHER; note = 2'-O-methylguanosine-3'-phosphate
  modified_base 5: mod_base = OTHER; note = 2'-O-methyladenosine-3'-phosphate
  modified_base 6: mod_base = OTHER; note = 2'-deoxy-2'-fluoroadenosine-3'-phosphate
  modified_base 7: mod_base = OTHER; note = 2'-O-methylguanosine-3'-phosphate
  modified_base 8: mod_base = OTHER; note = 2'-deoxy-2'-fluoroguanosine-3'-phosphate
  modified_base 9: mod_base = OTHER; note = 2'-deoxy-2'-fluoroadenosine-3'-phosphate
  modified_base 10: mod_base = OTHER; note = 2'-O-methylguanosine-3'-phosphate
  modified_base 11: mod_base = OTHER; note = 2'-O-methylcytidine-3'-phosphate
  modified_base 12: mod_base = OTHER; note = 2'-O-methylguanosine-3'-phosphate
  modified_base 13: mod_base = OTHER; note = 2'-O-methylcytidine-3'-phosphate
  modified_base 14: mod_base = OTHER; note = 2'-deoxy-2'-fluoroadenosine-3'-phosphate
  modified_base 15: mod_base = OTHER; note = 2'-O-methylguanosine-3'-phosphate
  modified_base 16: mod_base = OTHER; note = 2'-deoxy-2'-fluoroguanosine-3'-phosphate
  modified_base 17: mod_base = OTHER; note = 2'-O-methylcytidine-3'-phosphate
  modified_base 18: mod_base = OTHER; note = 2'-O-methyladenosine-3'-phosphate
  modified_base 19: mod_base = OTHER; note = 2'-O-methylguanosine-3'-phosphate
  modified_base 20: mod_base = OTHER; note = 2'-O-methyladenosine-3'-phosphate
  modified_base 21: mod_base = OTHER; note = 2'-O-methyladenosine-3'-phosphorothioate
  modified_base 22: mod_base = OTHER; note = 2'-O-methylguanosine-3'-phosphorothioate
  modified_base 23: mod_base = OTHER; note = 2'-O-methyluridine
agagaaggagcgcaggcagaagt

SEQ ID NO: 1120 - RNA, 23 nt, synthetic construct
  source 1..23: mol_type = other RNA
  modified_base 1: mod_base = OTHER; note = 2'-O-methyladenosine-3'-phosphorothioate
  modified_base 2: mod_base = OTHER; note = 2'-deoxy-2'-fluoroadenosine-3'-phosphorothioate
  modified_base 3: mod_base = OTHER; note = 2'-O-methylguanosine-3'-phosphate
  modified_base 4: mod_base = OTHER; note = 2'-O-methylcytidine-3'-phosphate
  modified_base 5: mod_base = OTHER; note = 2'-O-methylguanosine-3'-phosphate
  modified_base 6: mod_base = OTHER; note = 2'-deoxy-2'-fluorouridine-3'-phosphate
  modified_base 7: mod_base = OTHER; note = 2'-O-methyluridine-3'-phosphate
  modified_base 8: mod_base = OTHER; note = 2'-deoxy-2'-fluorocytidine-3'-phosphate
  modified_base 9: mod_base = OTHER; note = 2'-deoxy-2'-fluoroadenosine-3'-phosphate
  modified_base 10: mod_base = OTHER; note = 2'-O-methylguanosine-3'-phosphate
  modified_base 11: mod_base = OTHER; note = 2'-O-methyladenosine-3'-phosphate
  modified_base 12: mod_base = OTHER; note = 2'-O-methylguanosine-3'-phosphate
  modified_base 13: mod_base = OTHER; note = 2'-O-methyladenosine-3'-phosphate
  modified_base 14: mod_base = OTHER; note = 2'-deoxy-2'-fluoroadenosine-3'-phosphate
  modified_base 15: mod_base = OTHER; note = 2'-O-methylguanosine-3'-phosphate
  modified_base 16: mod_base = OTHER; note = 2'-deoxy-2'-fluoroguanosine-3'-phosphate
  modified_base 17: mod_base = OTHER; note = 2'-O-methyladenosine-3'-phosphate
  modified_base 18: mod_base = OTHER; note = 2'-O-methylguanosine-3'-phosphate
  modified_base 19: mod_base = OTHER; note = 2'-O-methylcytidine-3'-phosphate
  modified_base 20: mod_base = OTHER; note = 2'-O-methylguanosine-3'-phosphate
  modified_base 21: mod_base = OTHER; note = 2'-O-methylcytidine-3'-phosphorothioate
  modified_base 22: mod_base = OTHER; note = 2'-O-methyladenosine-3'-phosphorothioate
  modified_base 23: mod_base = OTHER; note = 2'-O-methylguanosine
aagcgttcagagaaggagcgcag

SEQ ID NO: 1121 - RNA, 23 nt, synthetic construct
  source 1..23: mol_type = other RNA
  modified_base 1: mod_base = OTHER; note = 2'-O-methyladenosine-3'-phosphorothioate
  modified_base 2: mod_base = OTHER; note = 2'-deoxy-2'-fluoroguanosine-3'-phosphorothioate
  modified_base 3: mod_base = OTHER; note = 2'-O-methyladenosine-3'-phosphate
  modified_base 4: mod_base = OTHER; note = 2'-O-methyladenosine-3'-phosphate
  modified_base 5: mod_base = OTHER; note = 2'-O-methylguanosine-3'-phosphate
  modified_base 6: mod_base = OTHER; note = 2'-deoxy-2'-fluorouridine-3'-phosphate
  modified_base 7: mod_base = OTHER; note = 2'-O-methylguanosine-3'-phosphate
  modified_base 8: mod_base = OTHER; note = 2'-deoxy-2'-fluoroadenosine-3'-phosphate
  modified_base 9: mod_base = OTHER; note = 2'-deoxy-2'-fluoroguanosine-3'-phosphate
  modified_base 10: mod_base = OTHER; note = 2'-O-methylcytidine-3'-phosphate
  modified_base 11: mod_base = OTHER; note = 2'-O-methylguanosine-3'-phosphate
  modified_base 12: mod_base = OTHER; note = 2'-O-methyluridine-3'-phosphate
  modified_base 13: mod_base = OTHER; note = 2'-O-methyluridine-3'-phosphate
  modified_base 14: mod_base = OTHER; note = 2'-deoxy-2'-fluorocytidine-3'-phosphate
  modified_base 15: mod_base = OTHER; note = 2'-O-methyladenosine-3'-phosphate
  modified_base 16: mod_base = OTHER; note = 2'-deoxy-2'-fluoroguanosine-3'-phosphate
  modified_base 17: mod_base = OTHER; note = 2'-O-methyladenosine-3'-phosphate
  modified_base 18: mod_base = OTHER; note = 2'-O-methylguanosine-3'-phosphate
  modified_base 19: mod_base = OTHER; note = 2'-O-methyladenosine-3'-phosphate
  modified_base 20: mod_base = OTHER; note = 2'-O-methyladenosine-3'-phosphate
  modified_base 21: mod_base = OTHER; note = 2'-O-methylguanosine-3'-phosphorothioate
  modified_base 22: mod_base = OTHER; note = 2'-O-methylguanosine-3'-phosphorothioate
  modified_base 23: mod_base = OTHER; note = 2'-O-methyladenosine
agaagtgagcgttcagagaagga

SEQ ID NO: 1122 - RNA, 23 nt, synthetic construct
  source 1..23: mol_type = other RNA
  modified_base 1: mod_base = OTHER; note = 2'-O-methyladenosine-3'-phosphorothioate
  modified_base 2: mod_base = OTHER; note = 2'-deoxy-2'-fluoroguanosine-3'-phosphorothioate
  modified_base 3: mod_base = OTHER; note = 2'-O-methyluridine-3'-phosphate
  modified_base 4: mod_base = OTHER; note = 2'-O-methylcytidine-3'-phosphate
  modified_base 5: mod_base = OTHER; note = 2'-O-methyluridine-3'-phosphate
  modified_base 6: mod_base = OTHER; note = 2'-deoxy-2'-fluorocytidine-3'-phosphate
  modified_base 7: mod_base = OTHER; note = 2'-O-methylcytidine-3'-phosphate
  modified_base 8: mod_base = OTHER; note = 2'-deoxy-2'-fluorouridine-3'-phosphate
  modified_base 9: mod_base = OTHER; note = 2'-deoxy-2'-fluorocytidine-3'-phosphate
  modified_base 10: mod_base = OTHER; note = 2'-O-methylguanosine-3'-phosphate
  modified_base 11: mod_base = OTHER; note = 2'-O-methylguanosine-3'-phosphate
  modified_base 12: mod_base = OTHER; note = 2'-O-methyladenosine-3'-phosphate
  modified_base 13: mod_base = OTHER; note = 2'-O-methyladenosine-3'-phosphate
  modified_base 14: mod_base = OTHER; note = 2'-deoxy-2'-fluoroguanosine-3'-phosphate
  modified_base 15: mod_base = OTHER; note = 2'-O-methyluridine-3'-phosphate
  modified_base 16: mod_base = OTHER; note = 2'-deoxy-2'-fluoroguanosine-3'-phosphate
  modified_base 17: mod_base = OTHER; note = 2'-O-methyladenosine-3'-phosphate
  modified_base 18: mod_base = OTHER; note = 2'-O-methylguanosine-3'-phosphate
  modified_base 19: mod_base = OTHER; note = 2'-O-methylcytidine-3'-phosphate
  modified_base 20: mod_base = OTHER; note = 2'-O-methylguanosine-3'-phosphate
  modified_base 21: mod_base = OTHER; note = 2'-O-methyluridine-3'-phosphorothioate
  modified_base 22: mod_base = OTHER; note = 2'-O-methyluridine-3'-phosphorothioate
  modified_base 23: mod_base = OTHER; note = 2'-O-methylcytidine
agtctcctcggaagtgagcgttc

SEQ ID NO: 1123 - RNA, 23 nt, synthetic construct
  source 1..23: mol_type = other RNA
  modified_base 1: mod_base = OTHER; note = 2'-O-methyladenosine-3'-phosphorothioate
  modified_base 2: mod_base = OTHER; note = 2'-deoxy-2'-fluoroadenosine-3'-phosphorothioate
  modified_base 3: mod_base = OTHER; note = 2'-O-methyluridine-3'-phosphate
  modified_base 4: mod_base = OTHER; note = 2'-O-methylcytidine-3'-phosphate
  modified_base 5: mod_base = OTHER; note = 2'-O-methylguanosine-3'-phosphate
  modified_base 6: mod_base = OTHER; note = 2'-deoxy-2'-fluorouridine-3'-phosphate
  modified_base 7: mod_base = OTHER; note = 2'-O-methylcytidine-3'-phosphate
  modified_base 8: mod_base = OTHER; note = 2'-deoxy-2'-fluoroguanosine-3'-phosphate
  modified_base 9: mod_base = OTHER; note = 2'-deoxy-2'-fluoroguanosine-3'-phosphate
  modified_base 10: mod_base = OTHER; note = 2'-O-methylcytidine-3'-phosphate
  modified_base 11: mod_base = OTHER; note = 2'-O-methylguanosine-3'-phosphate
  modified_base 12: mod_base = OTHER; note = 2'-O-methyluridine-3'-phosphate
  modified_base 13: mod_base = OTHER; note = 2'-O-methylcytidine-3'-phosphate
  modified_base 14: mod_base = OTHER; note = 2'-deoxy-2'-fluorouridine-3'-phosphate
  modified_base 15: mod_base = OTHER; note = 2'-O-methylcytidine-3'-phosphate
  modified_base 16: mod_base = OTHER; note = 2'-deoxy-2'-fluorocytidine-3'-phosphate
  modified_base 17: mod_base = OTHER; note = 2'-O-methyluridine-3'-phosphate
  modified_base 18: mod_base = OTHER; note = 2'-O-methylcytidine-3'-phosphate
  modified_base 19: mod_base = OTHER; note = 2'-O-methylguanosine-3'-phosphate
  modified_base 20: mod_base = OTHER; note = 2'-O-methylguanosine-3'-phosphate
  modified_base 21: mod_base = OTHER; note = 2'-O-methyladenosine-3'-phosphorothioate
  modified_base 22: mod_base = OTHER; note = 2'-O-methyladenosine-3'-phosphorothioate
  modified_base 23: mod_base = OTHER; note = 2'-O-methylguanosine
aatcgtcggcgtctcctcggaag

SEQ ID NO: 1124 - RNA, 23 nt, synthetic construct
  source 1..23: mol_type = other RNA
  modified_base 1: mod_base = OTHER; note = 2'-O-methyladenosine-3'-phosphorothioate
  modified_base 2: mod_base = OTHER; note = 2'-deoxy-2'-fluoroadenosine-3'-phosphorothioate
  modified_base 3: mod_base = OTHER; note = 2'-O-methylcytidine-3'-phosphate
  modified_base 4: mod_base = OTHER; note = 2'-O-methylguanosine-3'-phosphate
  modified_base 5: mod_base = OTHER; note = 2'-O-methylguanosine-3'-phosphate
  modified_base 6: mod_base = OTHER; note = 2'-deoxy-2'-fluorouridine-3'-phosphate
  modified_base 7: mod_base = OTHER; note = 2'-O-methylguanosine-3'-phosphate
  modified_base 8: mod_base = OTHER; note = 2'-deoxy-2'-fluorouridine-3'-phosphate
  modified_base 9: mod_base = OTHER; note = 2'-deoxy-2'-fluorocytidine-3'-phosphate
  modified_base 10: mod_base = OTHER; note = 2'-O-methyluridine-3'-phosphate
  modified_base 11: mod_base = OTHER; note = 2'-O-methyluridine-3'-phosphate
  modified_base 12: mod_base = OTHER; note = 2'-O-methylcytidine-3'-phosphate
  modified_base 13: mod_base = OTHER; note = 2'-O-methyladenosine-3'-phosphate
  modified_base 14: mod_base = OTHER; note = 2'-deoxy-2'-fluorouridine-3'-phosphate
  modified_base 15: mod_base = OTHER; note = 2'-O-methylcytidine-3'-phosphate
  modified_base 16: mod_base = OTHER; note = 2'-deoxy-2'-fluoroguanosine-3'-phosphate
  modified_base 17: mod_base = OTHER; note = 2'-O-methyluridine-3'-phosphate
  modified_base 18: mod_base = OTHER; note = 2'-O-methylcytidine-3'-phosphate
  modified_base 19: mod_base = OTHER; note = 2'-O-methylguanosine-3'-phosphate
  modified_base 20: mod_base = OTHER; note = 2'-O-methylguanosine-3'-phosphate
  modified_base 21: mod_base = OTHER; note = 2'-O-methylcytidine-3'-phosphorothioate
  modified_base 22: mod_base = OTHER; note = 2'-O-methylguanosine-3'-phosphorothioate
  modified_base 23: mod_base = OTHER; note = 2'-O-methyluridine
aacggtgtcttcatcgtcggcgt

SEQ ID NO: 1125 - RNA, 23 nt, synthetic construct
  source 1..23: mol_type = other RNA
  modified_base 1: mod_base = OTHER; note = 2'-O-methyladenosine-3'-phosphorothioate
  modified_base 2: mod_base = OTHER; note = 2'-deoxy-2'-fluoroadenosine-3'-phosphorothioate
  modified_base 3: mod_base = OTHER; note = 2'-O-methylcytidine-3'-phosphate
  modified_base 4: mod_base = OTHER; note = 2'-O-methylcytidine-3'-phosphate
  modified_base 5: mod_base = OTHER; note = 2'-O-methyluridine-3'-phosphate
  modified_base 6: mod_base = OTHER; note = 2'-deoxy-2'-fluorouridine-3'-phosphate
  modified_base 7: mod_base = OTHER; note = 2'-O-methylcytidine-3'-phosphate
  modified_base 8: mod_base = OTHER; note = 2'-deoxy-2'-fluorocytidine-3'-phosphate
  modified_base 9: mod_base = OTHER; note = 2'-deoxy-2'-fluoroadenosine-3'-phosphate
  modified_base 10: mod_base = OTHER; note = 2'-O-methylcytidine-3'-phosphate
  modified_base 11: mod_base = OTHER; note = 2'-O-methylguanosine-3'-phosphate
  modified_base 12: mod_base = OTHER; note = 2'-O-methylguanosine-3'-phosphate
  modified_base 13: mod_base = OTHER; note = 2'-O-methyluridine-3'-phosphate
  modified_base 14: mod_base = OTHER; note = 2'-deoxy-2'-fluoroguanosine-3'-phosphate
  modified_base 15: mod_base = OTHER; note = 2'-O-methyluridine-3'-phosphate
  modified_base 16: mod_base = OTHER; note = 2'-deoxy-2'-fluorocytidine-3'-phosphate
  modified_base 17: mod_base = OTHER; note = 2'-O-methyluridine-3'-phosphate
  modified_base 18: mod_base = OTHER; note = 2'-O-methyluridine-3'-phosphate
  modified_base 19: mod_base = OTHER; note = 2'-O-methylcytidine-3'-phosphate
  modified_base 20: mod_base = OTHER; note = 2'-O-methyladenosine-3'-phosphate
  modified_base 21: mod_base = OTHER; note = 2'-O-methyluridine-3'-phosphorothioate
  modified_base 22: mod_base = OTHER; note = 2'-O-methylcytidine-3'-phosphorothioate
  modified_base 23: mod_base = OTHER; note = 2'-O-methylguanosine
aaccttccacggtgtcttcatcg

SEQ ID NO: 1126 - RNA, 23 nt, synthetic construct
  source 1..23: mol_type = other RNA
  modified_base 1: mod_base = OTHER; note = 2'-O-methyladenosine-3'-phosphorothioate
  modified_base 2: mod_base = OTHER; note = 2'-deoxy-2'-fluoroadenosine-3'-phosphorothioate
  modified_base 3: mod_base = OTHER; note = 2'-O-methylguanosine-3'-phosphate
  modified_base 4: mod_base = OTHER; note = 2'-O-methyladenosine-3'-phosphate
  modified_base 5: mod_base = OTHER; note = 2'-O-methyladenosine-3'-phosphate
  modified_base 6: mod_base = OTHER; note = 2'-deoxy-2'-fluoroguanosine-3'-phosphate
  modified_base 7: mod_base = OTHER; note = 2'-O-methyladenosine-3'-phosphate
  modified_base 8: mod_base = OTHER; note = 2'-deoxy-2'-fluoroadenosine-3'-phosphate
  modified_base 9: mod_base = OTHER; note = 2'-deoxy-2'-fluorocytidine-3'-phosphate
  modified_base 10: mod_base = OTHER; note = 2'-O-methylcytidine-3'-phosphate
  modified_base 11: mod_base = OTHER; note = 2'-O-methyluridine-3'-phosphate
  modified_base 12: mod_base = OTHER; note = 2'-O-methyluridine-3'-phosphate
  modified_base 13: mod_base = OTHER; note = 2'-O-methylcytidine-3'-phosphate
  modified_base 14: mod_base = OTHER; note = 2'-deoxy-2'-fluorocytidine-3'-phosphate
  modified_base 15: mod_base = OTHER; note = 2'-O-methyladenosine-3'-phosphate
  modified_base 16: mod_base = OTHER; note = 2'-deoxy-2'-fluorocytidine-3'-phosphate
  modified_base 17: mod_base = OTHER; note = 2'-O-methylguanosine-3'-phosphate
  modified_base 18: mod_base = OTHER; note = 2'-O-methylguanosine-3'-phosphate
  modified_base 19: mod_base = OTHER; note = 2'-O-methyluridine-3'-phosphate
  modified_base 20: mod_base = OTHER; note = 2'-O-methylguanosine-3'-phosphate
  modified_base 21: mod_base = OTHER; note = 2'-O-methyluridine-3'-phosphorothioate
  modified_base 22: mod_base = OTHER; note = 2'-O-methylcytidine-3'-phosphorothioate
  modified_base 23: mod_base = OTHER; note = 2'-O-methyluridine
aagaagaaccttccacggtgtct

SEQ ID NO: 1127 - RNA, 23 nt, synthetic construct
  source 1..23: mol_type = other RNA
  modified_base 1: mod_base = OTHER; note = 2'-O-methyladenosine-3'-phosphorothioate
  modified_base 2: mod_base = OTHER; note = 2'-deoxy-2'-fluoroadenosine-3'-phosphorothioate
  modified_base 3: mod_base = OTHER; note = 2'-O-methylguanosine-3'-phosphate
  modified_base 4: mod_base = OTHER; note = 2'-O-methyluridine-3'-phosphate
  modified_base 5: mod_base = OTHER; note = 2'-O-methylcytidine-3'-phosphate
  modified_base 6: mod_base = OTHER; note = 2'-deoxy-2'-fluorocytidine-3'-phosphate
  modified_base 7: mod_base = OTHER; note = 2'-O-methylcytidine-3'-phosphate
  modified_base 8: mod_base = OTHER; note = 2'-deoxy-2'-fluoroadenosine-3'-phosphate
  modified_base 9: mod_base = OTHER; note = 2'-deoxy-2'-fluoroguanosine-3'-phosphate
  modified_base 10: mod_base = OTHER; note = 2'-O-methyladenosine-3'-phosphate
  modified_base 11: mod_base = OTHER; note = 2'-O-methyladenosine-3'-phosphate
  modified_base 12: mod_base = OTHER; note = 2'-O-methylguanosine-3'-phosphate
  modified_base 13: mod_base = OTHER; note = 2'-O-methyladenosine-3'-phosphate
  modified_base 14: mod_base = OTHER; note = 2'-deoxy-2'-fluoroadenosine-3'-phosphate
  modified_base 15: mod_base = OTHER; note = 2'-O-methylcytidine-3'-phosphate
  modified_base 16: mod_base = OTHER; note = 2'-deoxy-2'-fluorocytidine-3'-phosphate
  modified_base 17: mod_base = OTHER; note = 2'-O-methyluridine-3'-phosphate
  modified_base 18: mod_base = OTHER; note = 2'-O-methyluridine-3'-phosphate
  modified_base 19: mod_base = OTHER; note = 2'-O-methylcytidine-3'-phosphate
  modified_base 20: mod_base = OTHER; note = 2'-O-methylcytidine-3'-phosphate
  modified_base 21: mod_base = OTHER; note = 2'-O-methyladenosine-3'-phosphorothioate
  modified_base 22: mod_base = OTHER; note = 2'-O-methylcytidine-3'-phosphorothioate
  modified_base 23: mod_base = OTHER; note = 2'-O-methylguanosine
aagtcccagaagaaccttccacg

SEQ ID NO: 1128 - RNA, 23 nt, synthetic construct
  source 1..23: mol_type = other RNA
  modified_base 1: mod_base = OTHER; note = 2'-O-methyladenosine-3'-phosphorothioate
  modified_base 2: mod_base = OTHER; note = 2'-deoxy-2'-fluorouridine-3'-phosphorothioate
  modified_base 3: mod_base = OTHER; note = 2'-O-methylguanosine-3'-phosphate
  modified_base 4: mod_base = OTHER; note = 2'-O-methylguanosine-3'-phosphate
  modified_base 5: mod_base = OTHER; note = 2'-O-methyluridine-3'-phosphate
  modified_base 6: mod_base = OTHER; note = 2'-deoxy-2'-fluoroguanosine-3'-phosphate
  modified_base 7: mod_base = OTHER; note = 2'-O-methyladenosine-3'-phosphate
  modified_base 8: mod_base = OTHER; note = 2'-deoxy-2'-fluorocytidine-3'-phosphate
  modified_base 9: mod_base = OTHER; note = 2'-deoxy-2'-fluoroadenosine-3'-phosphate
  modified_base 10: mod_base = OTHER; note = 2'-O-methyladenosine-3'-phosphate
  modified_base 11: mod_base = OTHER; note = 2'-O-methylguanosine-3'-phosphate
  modified_base 12: mod_base = OTHER; note = 2'-O-methylcytidine-3'-phosphate
  modified_base 13: mod_base = OTHER; note = 2'-O-methylguanosine-3'-phosphate
  modified_base 14: mod_base = OTHER; note = 2'-deoxy-2'-fluorocytidine-3'-phosphate
  modified_base 15: mod_base = OTHER; note = 2'-O-methyladenosine-3'-phosphate
  modified_base 16: mod_base = OTHER; note = 2'-deoxy-2'-fluoroguanosine-3'-phosphate
  modified_base 17: mod_base = OTHER; note = 2'-O-methylcytidine-3'-phosphate
  modified_base 18: mod_base = OTHER; note = 2'-O-methyladenosine-3'-phosphate
  modified_base 19: mod_base = OTHER; note = 2'-O-methylguanosine-3'-phosphate
  modified_base 20: mod_base = OTHER; note = 2'-O-methylcytidine-3'-phosphate
  modified_base 21: mod_base = OTHER; note = 2'-O-methyladenosine-3'-phosphorothioate
  modified_base 22: mod_base = OTHER; note = 2'-O-methylcytidine-3'-phosphorothioate
  modified_base 23: mod_base = OTHER; note = 2'-O-methylcytidine
atggtgacaagcgcagcagcacc

SEQ ID NO: 1129 - RNA, 23 nt, synthetic construct
  source 1..23: mol_type = other RNA
  modified_base 1: mod_base = OTHER; note = 2'-O-methyladenosine-3'-phosphorothioate
  modified_base 2: mod_base = OTHER; note = 2'-deoxy-2'-fluorouridine-3'-phosphorothioate
  modified_base 3: mod_base = OTHER; note = 2'-O-methylguanosine-3'-phosphate
  modified_base 4: mod_base = OTHER; note = 2'-O-methyladenosine-3'-phosphate
  modified_base 5: mod_base = OTHER; note = 2'-O-methyluridine-3'-phosphate
  modified_base 6: mod_base = OTHER; note = 2'-deoxy-2'-fluoroguanosine-3'-phosphate
  modified_base 7: mod_base = OTHER; note = 2'-O-methyladenosine-3'-phosphate
  modified_base 8: mod_base = OTHER; note = 2'-deoxy-2'-fluorouridine-3'-phosphate
  modified_base 9: mod_base = OTHER; note = 2'-deoxy-2'-fluoroguanosine-3'-phosphate
  modified_base 10: mod_base = OTHER; note = 2'-O-methylguanosine-3'-phosphate
  modified_base 11: mod_base = OTHER; note = 2'-O-methyluridine-3'-phosphate
  modified_base 12: mod_base = OTHER; note = 2'-O-methylguanosine-3'-phosphate
  modified_base 13: mod_base = OTHER; note = 2'-O-methyladenosine-3'-phosphate
  modified_base 14: mod_base = OTHER; note = 2'-deoxy-2'-fluorocytidine-3'-phosphate
  modified_base 15: mod_base = OTHER; note = 2'-O-methyladenosine-3'-phosphate
  modified_base 16: mod_base = OTHER; note = 2'-deoxy-2'-fluoroadenosine-3'-phosphate
  modified_base 17: mod_base = OTHER; note = 2'-O-methylguanosine-3'-phosphate
  modified_base 18: mod_base = OTHER; note = 2'-O-methylcytidine-3'-phosphate
  modified_base 19: mod_base = OTHER; note = 2'-O-methylguanosine-3'-phosphate
  modified_base 20: mod_base = OTHER; note = 2'-O-methylcytidine-3'-phosphate
  modified_base 21: mod_base = OTHER; note = 2'-O-methyladenosine-3'-phosphorothioate
  modified_base 22: mod_base = OTHER; note = 2'-O-methylguanosine-3'-phosphorothioate
  modified_base 23: mod_base = OTHER; note = 2'-O-methylcytidine
atgatgatggtgacaagcgcagc

SEQ ID NO: 1130 - RNA, 23 nt, synthetic construct
  source 1..23: mol_type = other RNA
  modified_base 1: mod_base = OTHER; note = 2'-O-methyladenosine-3'-phosphorothioate
  modified_base 2: mod_base = OTHER; note = 2'-deoxy-2'-fluorouridine-3'-phosphorothioate
  modified_base 3: mod_base = OTHER; note = 2'-O-methylcytidine-3'-phosphate
  modified_base 4: mod_base = OTHER; note = 2'-O-methyladenosine-3'-phosphate
  modified_base 5: mod_base = OTHER; note = 2'-O-methylguanosine-3'-phosphate
  modified_base 6: mod_base = OTHER; note = 2'-deoxy-2'-fluorocytidine-3'-phosphate
  modified_base 7: mod_base = OTHER; note = 2'-O-methyladenosine-3'-phosphate
  modified_base 8: mod_base = OTHER; note = 2'-deoxy-2'-fluoroguanosine-3'-phosphate
  modified_base 9: mod_base = OTHER; note = 2'-deoxy-2'-fluoroadenosine-3'-phosphate
  modified_base 10: mod_base = OTHER; note = 2'-O-methyladenosine-3'-phosphate
  modified_base 11: mod_base = OTHER; note = 2'-O-methylcytidine-3'-phosphate
  modified_base 12: mod_base = OTHER; note = 2'-O-methylcytidine-3'-phosphate
  modified_base 13: mod_base = OTHER; note = 2'-O-methyladenosine-3'-phosphate
  modified_base 14: mod_base = OTHER; note = 2'-deoxy-2'-fluorocytidine-3'-phosphate
  modified_base 15: mod_base = OTHER; note = 2'-O-methylguanosine-3'-phosphate
  modified_base 16: mod_base = OTHER; note = 2'-deoxy-2'-fluoroguanosine-3'-phosphate
  modified_base 17: mod_base = OTHER; note = 2'-O-methylguanosine-3'-phosphate
  modified_base 18: mod_base = OTHER; note = 2'-O-methylcytidine-3'-phosphate
  modified_base 19: mod_base = OTHER; note = 2'-O-methyladenosine-3'-phosphate
  modified_base 20: mod_base = OTHER; note = 2'-O-methylcytidine-3'-phosphate
  modified_base 21: mod_base = OTHER; note = 2'-O-methylguanosine-3'-phosphorothioate
  modified_base 22: mod_base = OTHER; note = 2'-O-methylguanosine-3'-phosphorothioate
  modified_base 23: mod_base = OTHER; note = 2'-O-methyluridine
atcagcagaaccacgggcacggt

SEQ ID NO: 1131 - RNA, 23 nt, synthetic construct
  source 1..23: mol_type = other RNA
  modified_base 1: mod_base = OTHER; note = 2'-O-methyladenosine-3'-phosphorothioate
  modified_base 2: mod_base = OTHER; note = 2'-deoxy-2'-fluorocytidine-3'-phosphorothioate
  modified_base 3: mod_base = OTHER; note = 2'-O-methyluridine-3'-phosphate
  modified_base 4: mod_base = OTHER; note = 2'-O-methyluridine-3'-phosphate
  modified_base 5: mod_base = OTHER; note = 2'-O-methyluridine-3'-phosphate
  modified_base 6: mod_base = OTHER; note = 2'-deoxy-2'-fluoroguanosine-3'-phosphate
  modified_base 7: mod_base = OTHER; note = 2'-O-methyluridine-3'-phosphate
  modified_base 8: mod_base = OTHER; note = 2'-deoxy-2'-fluorouridine-3'-phosphate
  modified_base 9: mod_base = OTHER; note = 2'-deoxy-2'-fluorocytidine-3'-phosphate
  modified_base 10: mod_base = OTHER; note = 2'-O-methyladenosine-3'-phosphate
  modified_base 11: mod_base = OTHER; note = 2'-O-methylguanosine-3'-phosphate
  modified_base 12: mod_base = OTHER; note = 2'-O-methylcytidine-3'-phosphate
  modified_base 13: mod_base = OTHER; note = 2'-O-methyladenosine-3'-phosphate
  modified_base 14: mod_base = OTHER; note = 2'-deoxy-2'-fluoroguanosine-3'-phosphate
  modified_base 15: mod_base = OTHER; note = 2'-O-methyladenosine-3'-phosphate
  modified_base 16: mod_base = OTHER; note = 2'-deoxy-2'-fluoroadenosine-3'-phosphate
  modified_base 17: mod_base = OTHER; note = 2'-O-methylcytidine-3'-phosphate
  modified_base 18: mod_base = OTHER; note = 2'-O-methylcytidine-3'-phosphate
  modified_base 19: mod_base = OTHER; note = 2'-O-methyladenosine-3'-phosphate
  modified_base 20: mod_base = OTHER; note = 2'-O-methylcytidine-3'-phosphate
  modified_base 21: mod_base = OTHER; note = 2'-O-methylguanosine-3'-phosphorothioate
  modified_base 22: mod_base = OTHER; note = 2'-O-methylguanosine-3'-phosphorothioate
  modified_base 23: mod_base = OTHER; note = 2'-O-methylguanosine
actttgttcagcagaaccacggg

SEQ ID NO: 1132 - RNA, 23 nt, synthetic construct
  source 1..23: mol_type = other RNA
  modified_base 1: mod_base = OTHER; note = 2'-O-methyladenosine-3'-phosphorothioate
  modified_base 2: mod_base = OTHER; note = 2'-deoxy-2'-fluoroadenosine-3'-phosphorothioate
  modified_base 3: mod_base = OTHER; note = 2'-O-methyluridine-3'-phosphate
  modified_base 4: mod_base = OTHER; note = 2'-O-methylcytidine-3'-phosphate
  modified_base 5: mod_base = OTHER; note = 2'-O-methyluridine-3'-phosphate
  modified_base 6: mod_base = OTHER; note = 2'-deoxy-2'-fluoroguanosine-3'-phosphate
  modified_base 7: mod_base = OTHER; note = 2'-O-methyluridine-3'-phosphate
  modified_base 8: mod_base = OTHER; note = 2'-deoxy-2'-fluoroguanosine-3'-phosphate
  modified_base 9: mod_base = OTHER; note = 2'-deoxy-2'-fluorocytidine-3'-phosphate
  modified_base 10: mod_base = OTHER; note = 2'-O-methylcytidine-3'-phosphate
  modified_base 11: mod_base = OTHER; note = 2'-O-methyluridine-3'-phosphate
  modified_base 12: mod_base = OTHER; note = 2'-O-methyluridine-3'-phosphate
  modified_base 13: mod_base = OTHER; note = 2'-O-methyluridine-3'-phosphate
  modified_base 14: mod_base = OTHER; note = 2'-deoxy-2'-fluoroguanosine-3'-phosphate
  modified_base 15: mod_base = OTHER; note = 2'-O-methyluridine-3'-phosphate
  modified_base 16: mod_base = OTHER; note = 2'-deoxy-2'-fluorouridine-3'-phosphate
  modified_base 17: mod_base = OTHER; note = 2'-O-methylcytidine-3'-phosphate
  modified_base 18: mod_base = OTHER; note = 2'-O-methyladenosine-3'-phosphate
  modified_base 19: mod_base = OTHER; note = 2'-O-methylguanosine-3'-phosphate
  modified_base 20: mod_base = OTHER; note = 2'-O-methylcytidine-3'-phosphate
  modified_base 21: mod_base = OTHER; note = 2'-O-methyladenosine-3'-phosphorothioate
  modified_base 22: mod_base = OTHER; note = 2'-O-methylguanosine-3'-phosphorothioate
  modified_base 23: mod_base = OTHER; note = 2'-O-methyladenosine
aatctgtgcctttgttcagcaga

SEQ ID NO: 1133 - RNA, 23 nt, synthetic construct
  source 1..23: mol_type = other RNA
  modified_base 1: mod_base = OTHER; note = 2'-O-methyladenosine-3'-phosphorothioate
  modified_base 2: mod_base = OTHER; note = 2'-deoxy-2'-fluoroadenosine-3'-phosphorothioate
  modified_base 3: mod_base = OTHER; note = 2'-O-methylguanosine-3'-phosphate
  modified_base 4: mod_base = OTHER; note = 2'-O-methylcytidine-3'-phosphate
  modified_base 5: mod_base = OTHER; note = 2'-O-methyladenosine-3'-phosphate
  modified_base 6: mod_base = OTHER; note = 2'-deoxy-2'-fluorouridine-3'-phosphate
  modified_base 7: mod_base = OTHER; note = 2'-O-methylcytidine-3'-phosphate
  modified_base 8: mod_base = OTHER; note = 2'-deoxy-2'-fluoroadenosine-3'-phosphate
  modified_base 9: mod_base = OTHER; note = 2'-deoxy-2'-fluorouridine-3'-phosphate
  modified_base 10: mod_base = OTHER; note = 2'-O-methylcytidine-3'-phosphate
  modified_base 11: mod_base = OTHER; note = 2'-O-methyluridine-3'-phosphate
  modified_base 12: mod_base = OTHER; note = 2'-O-methylguanosine-3'-phosphate
  modified_base 13: mod_base = OTHER; note = 2'-O-methyluridine-3'-phosphate
  modified_base 14: mod_base = OTHER; note = 2'-deoxy-2'-fluoroguanosine-3'-phosphate
  modified_base 15: mod_base = OTHER; note = 2'-O-methylcytidine-3'-phosphate
  modified_base 16: mod_base = OTHER; note = 2'-deoxy-2'-fluorocytidine-3'-phosphate
  modified_base 17: mod_base = OTHER; note = 2'-O-methyluridine-3'-phosphate
  modified_base 18: mod_base = OTHER; note = 2'-O-methyluridine-3'-phosphate
  modified_base 19: mod_base = OTHER; note = 2'-O-methyluridine-3'-phosphate
  modified_base 20: mod_base = OTHER; note = 2'-O-methylguanosine-3'-phosphate
  modified_base 21: mod_base = OTHER; note = 2'-O-methyluridine-3'-phosphorothioate
  modified_base 22: mod_base = OTHER; note = 2'-O-methyluridine-3'-phosphorothioate
  modified_base 23: mod_base = OTHER; note = 2'-O-methylcytidine
aagcatcatctgtgcctttgttc

SEQ ID NO: 1134 - RNA, 23 nt, synthetic construct
  source 1..23: mol_type = other RNA
  modified_base 1: mod_base = OTHER; note = 2'-O-methyladenosine-3'-phosphorothioate
  modified_base 2: mod_base = OTHER; note = 2'-deoxy-2'-fluoroadenosine-3'-phosphorothioate
  modified_base 3: mod_base = OTHER; note = 2'-O-methylguanosine-3'-phosphate
  modified_base 4: mod_base = OTHER; note = 2'-O-methylcytidine-3'-phosphate
  modified_base 5: mod_base = OTHER; note = 2'-O-methyluridine-3'-phosphate
  modified_base 6: mod_base = OTHER; note = 2'-deoxy-2'-fluoroguanosine-3'-phosphate
  modified_base 7: mod_base = OTHER; note = 2'-O-methyluridine-3'-phosphate
  modified_base 8: mod_base = OTHER; note = 2'-deoxy-2'-fluoroadenosine-3'-phosphate
  modified_base 9: mod_base = OTHER; note = 2'-deoxy-2'-fluoroguanosine-3'-phosphate
  modified_base 10: mod_base = OTHER; note = 2'-O-methylcytidine-3'-phosphate
  modified_base 11: mod_base = OTHER; note = 2'-O-methyladenosine-3'-phosphate
  modified_base 12: mod_base = OTHER; note = 2'-O-methyluridine-3'-phosphate
  modified_base 13: mod_base = OTHER; note = 2'-O-methylcytidine-3'-phosphate
  modified_base 14: mod_base = OTHER; note = 2'-deoxy-2'-fluoroadenosine-3'-phosphate
  modified_base 15: mod_base = OTHER; note = 2'-O-methyluridine-3'-phosphate
  modified_base 16: mod_base = OTHER; note = 2'-deoxy-2'-fluorocytidine-3'-phosphate
  modified_base 17: mod_base = OTHER; note = 2'-O-methyluridine-3'-phosphate
  modified_base 18: mod_base = OTHER; note = 2'-O-methylguanosine-3'-phosphate
  modified_base 19: mod_base = OTHER; note = 2'-O-methyluridine-3'-phosphate
  modified_base 20: mod_base = OTHER; note = 2'-O-methylguanosine-3'-phosphate
  modified_base 21: mod_base = OTHER; note = 2'-O-methylcytidine-3'-phosphorothioate
  modified_base 22: mod_base = OTHER; note = 2'-O-methylcytidine-3'-phosphorothioate
  modified_base 23: mod_base = OTHER; note = 2'-O-methyluridine
aagctgtagcatcatctgtgcct

SEQ ID NO: 1135 - RNA, 23 nt, synthetic construct
  source 1..23: mol_type = other RNA
  modified_base 1: mod_base = OTHER; note = 2'-O-methyladenosine-3'-phosphorothioate
  modified_base 2: mod_base = OTHER; note = 2'-deoxy-2'-fluorocytidine-3'-phosphorothioate
  modified_base 3: mod_base = OTHER; note = 2'-O-methylguanosine-3'-phosphate
  modified_base 4: mod_base = OTHER; note = 2'-O-methyladenosine-3'-phosphate
  modified_base 5: mod_base = OTHER; note = 2'-O-methylcytidine-3'-phosphate
  modified_base 6: mod_base = OTHER; note = 2'-deoxy-2'-fluorouridine-3'-phosphate
  modified_base 7: mod_base = OTHER; note = 2'-O-methylguanosine-3'-phosphate
  modified_base 8: mod_base = OTHER; note = 2'-deoxy-2'-fluorouridine-3'-phosphate
  modified_base 9: mod_base = OTHER; note = 2'-deoxy-2'-fluorocytidine-3'-phosphate
  modified_base 10: mod_base = OTHER; note = 2'-O-methyladenosine-3'-phosphate
  modified_base 11: mod_base = OTHER; note = 2'-O-methylguanosine-3'-phosphate
  modified_base 12: mod_base = OTHER; note = 2'-O-methylcytidine-3'-phosphate
  modified_base 13: mod_base = OTHER; note = 2'-O-methyluridine-3'-phosphate
  modified_base 14: mod_base = OTHER; note = 2'-deoxy-2'-fluoroguanosine-3'-phosphate
  modified_base 15: mod_base = OTHER; note = 2'-O-methyluridine-3'-phosphate
  modified_base 16: mod_base = OTHER; note = 2'-deoxy-2'-fluoroadenosine-3'-phosphate
  modified_base 17: mod_base = OTHER; note = 2'-O-methylguanosine-3'-phosphate
  modified_base 18: mod_base = OTHER; note = 2'-O-methylcytidine-3'-phosphate
  modified_base 19: mod_base = OTHER; note = 2'-O-methyladenosine-3'-phosphate
  modified_base 20: mod_base = OTHER; note = 2'-O-methyluridine-3'-phosphate
  modified_base 21: mod_base = OTHER; note = 2'-O-methylcytidine-3'-phosphorothioate
  modified_base 22: mod_base = OTHER; note = 2'-O-methyladenosine-3'-phosphorothioate
  modified_base 23: mod_base = OTHER; note = 2'-O-methyluridine
acgactgtcagctgtagcatcat

SEQ ID NO: 1136 - RNA, 23 nt, synthetic construct
  source 1..23: mol_type = other RNA
  modified_base 1: mod_base = OTHER; note = 2'-O-methyladenosine-3'-phosphorothioate
  modified_base 2: mod_base = OTHER; note = 2'-deoxy-2'-fluoroadenosine-3'-phosphorothioate
  modified_base 3: mod_base = OTHER; note = 2'-O-methylguanosine-3'-phosphate
  modified_base 4: mod_base = OTHER; note = 2'-O-methyluridine-3'-phosphate
  modified_base 5: mod_base = OTHER; note = 2'-O-methyluridine-3'-phosphate
  modified_base 6: mod_base = OTHER; note = 2'-deoxy-2'-fluorouridine-3'-phosphate
  modified_base 7: mod_base = OTHER; note = 2'-O-methyluridine-3'-phosphate
  modified_base 8: mod_base = OTHER; note = 2'-deoxy-2'-fluoroguanosine-3'-phosphate
  modified_base 9: mod_base = OTHER; note = 2'-deoxy-2'-fluorocytidine-3'-phosphate
  modified_base 10: mod_base = OTHER; note = 2'-O-methylguanosine-3'-phosphate
  modified_base 11: mod_base = OTHER; note = 2'-O-methyladenosine-3'-phosphate
  modified_base 12: mod_base = OTHER; note = 2'-O-methylcytidine-3'-phosphate
  modified_base 13: mod_base = OTHER; note = 2'-O-methyluridine-3'-phosphate
  modified_base 14: mod_base = OTHER; note = 2'-deoxy-2'-fluoroguanosine-3'-phosphate
  modified_base 15: mod_base = OTHER; note = 2'-O-methyluridine-3'-phosphate
  modified_base 16: mod_base = OTHER; note = 2'-deoxy-2'-fluorocytidine-3'-phosphate
  modified_base 17: mod_base = OTHER; note = 2'-O-methyladenosine-3'-phosphate
  modified_base 18: mod_base = OTHER; note = 2'-O-methylguanosine-3'-phosphate
  modified_base 19: mod_base = OTHER; note = 2'-O-methylcytidine-3'-phosphate
  modified_base 20: mod_base = OTHER; note = 2'-O-methyluridine-3'-phosphate
  modified_base 21: mod_base = OTHER; note = 2'-O-methylguanosine-3'-phosphorothioate
  modified_base 22: mod_base = OTHER; note = 2'-O-methyluridine-3'-phosphorothioate
  modified_base 23: mod_base = OTHER; note = 2'-O-methyladenosine
aagttttgcgactgtcagctgta

SEQ ID NO: 1137 - RNA, 23 nt, synthetic construct
  source 1..23: mol_type = other RNA
  modified_base 1: mod_base = OTHER; note = 2'-O-methyladenosine-3'-phosphorothioate
  modified_base 2: mod_base = OTHER; note = 2'-deoxy-2'-fluoroadenosine-3'-phosphorothioate
  modified_base 3: mod_base = OTHER; note = 2'-O-methylguanosine-3'-phosphate
  modified_base 4: mod_base = OTHER; note = 2'-O-methyluridine-3'-phosphate
  modified_base 5: mod_base = OTHER; note = 2'-O-methylguanosine-3'-phosphate
  modified_base 6: mod_base = OTHER; note = 2'-deoxy-2'-fluorouridine-3'-phosphate
  modified_base 7: mod_base = OTHER; note = 2'-O-methyladenosine-3'-phosphate
  modified_base 8: mod_base = OTHER; note = 2'-deoxy-2'-fluoroadenosine-3'-phosphate
  modified_base 9: mod_base = OTHER; note = 2'-deoxy-2'-fluoroguanosine-3'-phosphate
  modified_base 10: mod_base = OTHER; note = 2'-O-methyluridine-3'-phosphate
  modified_base 11: mod_base = OTHER; note = 2'-O-methyluridine-3'-phosphate
  modified_base 12: mod_base = OTHER; note = 2'-O-methyluridine-3'-phosphate
  modified_base 13: mod_base = OTHER; note = 2'-O-methyluridine-3'-phosphate
  modified_base 14: mod_base = OTHER; note = 2'-deoxy-2'-fluoroguanosine-3'-phosphate
  modified_base 15: mod_base = OTHER; note = 2'-O-methylcytidine-3'-phosphate
  modified_base 16: mod_base = OTHER; note = 2'-deoxy-2'-fluoroguanosine-3'-phosphate
  modified_base 17: mod_base = OTHER; note = 2'-O-methyladenosine-3'-phosphate
  modified_base 18: mod_base = OTHER; note = 2'-O-methylcytidine-3'-phosphate
  modified_base 19: mod_base = OTHER; note = 2'-O-methyluridine-3'-phosphate
  modified_base 20: mod_base = OTHER; note = 2'-O-methylguanosine-3'-phosphate
  modified_base 21: mod_base = OTHER; note = 2'-O-methyluridine-3'-phosphorothioate
  modified_base 22: mod_base = OTHER; note = 2'-O-methylcytidine-3'-phosphorothioate
  modified_base 23: mod_base = OTHER; note = 2'-O-methyladenosine
aagtgtaagttttgcgactgtca

SEQ ID NO: 1138 - RNA, 23 nt, synthetic construct
  source 1..23: mol_type = other RNA
  modified_base 1: mod_base = OTHER; note = 2'-O-methyladenosine-3'-phosphorothioate
  modified_base 2: mod_base = OTHER; note = 2'-deoxy-2'-fluoroadenosine-3'-phosphorothioate
  modified_base 3: mod_base = OTHER; note = 2'-O-methyladenosine-3'-phosphate
  modified_base 4: mod_base = OTHER; note = 2'-O-methyluridine-3'-phosphate
  modified_base 5: mod_base = OTHER; note = 2'-O-methylcytidine-3'-phosphate
  modified_base 6: mod_base = OTHER; note = 2'-deoxy-2'-fluoroadenosine-3'-phosphate
  modified_base 7: mod_base = OTHER; note = 2'-O-methylguanosine-3'-phosphate
  modified_base 8: mod_base = OTHER; note = 2'-deoxy-2'-fluorouridine-3'-phosphate
  modified_base 9: mod_base = OTHER; note = 2'-deoxy-2'-fluorouridine-3'-phosphate
  modified_base 10: mod_base = OTHER; note = 2'-O-methyladenosine-3'-phosphate
  modified_base 11: mod_base = OTHER; note = 2'-O-methylguanosine-3'-phosphate
  modified_base 12: mod_base = OTHER; note = 2'-O-methyladenosine-3'-phosphate
  modified_base 13: mod_base = OTHER; note = 2'-O-methylguanosine-3'-phosphate
  modified_base 14: mod_base = OTHER; note = 2'-deoxy-2'-fluorouridine-3'-phosphate
  modified_base 15: mod_base = OTHER; note = 2'-O-methylguanosine-3'-phosphate
  modified_base 16: mod_base = OTHER; note = 2'-deoxy-2'-fluorouridine-3'-phosphate
  modified_base 17: mod_base = OTHER; note = 2'-O-methyladenosine-3'-phosphate
  modified_base 18: mod_base = OTHER; note = 2'-O-methyladenosine-3'-phosphate
  modified_base 19: mod_base = OTHER; note = 2'-O-methylguanosine-3'-phosphate
  modified_base 20: mod_base = OTHER; note = 2'-O-methyluridine-3'-phosphate
  modified_base 21: mod_base = OTHER; note = 2'-O-methyluridine-3'-phosphorothioate
  modified_base 22: mod_base = OTHER; note = 2'-O-methyluridine-3'-phosphorothioate
  modified_base 23: mod_base = OTHER; note = 2'-O-methyluridine
aaatcagttagagtgtaagtttt

SEQ ID NO: 1139 - RNA, 23 nt, synthetic construct
  source 1..23: mol_type = other RNA
  modified_base 1: mod_base = OTHER; note = 2'-O-methyladenosine-3'-phosphorothioate
  modified_base 2: mod_base = OTHER; note = 2'-deoxy-2'-fluorouridine-3'-phosphorothioate
  modified_base 3: mod_base = OTHER; note = 2'-O-methyluridine-3'-phosphate
  modified_base 4: mod_base = OTHER; note = 2'-O-methyladenosine-3'-phosphate
  modified_base 5: mod_base = OTHER; note = 2'-O-methyladenosine-3'-phosphate
  modified_base 6: mod_base = OTHER; note = 2'-deoxy-2'-fluoroguanosine-3'-phosphate
  modified_base 7: mod_base = OTHER; note = 2'-O-methyluridine-3'-phosphate
  modified_base 8: mod_base = OTHER; note = 2'-deoxy-2'-fluoroadenosine-3'-phosphate
  modified_base 9: mod_base = OTHER; note = 2'-deoxy-2'-fluoroadenosine-3'-phosphate
  modified_base 10: mod_base = OTHER; note = 2'-O-methyluridine-3'-phosphate
  modified_base 11: mod_base = OTHER; note = 2'-O-methylcytidine-3'-phosphate
  modified_base 12: mod_base = OTHER; note = 2'-O-methyladenosine-3'-phosphate
  modified_base 13: mod_base = OTHER; note = 2'-O-methylguanosine-3'-phosphate
  modified_base 14: mod_base = OTHER; note = 2'-deoxy-2'-fluorouridine-3'-phosphate
  modified_base 15: mod_base = OTHER; note = 2'-O-methyluridine-3'-phosphate
  modified_base 16: mod_base = OTHER; note = 2'-deoxy-2'-fluoroadenosine-3'-phosphate
  modified_base 17: mod_base = OTHER; note = 2'-O-methylguanosine-3'-phosphate
  modified_base 18: mod_base = OTHER; note = 2'-O-methyladenosine-3'-phosphate
  modified_base 19: mod_base = OTHER; note = 2'-O-methylguanosine-3'-phosphate
  modified_base 20: mod_base = OTHER; note = 2'-O-methyluridine-3'-phosphate
  modified_base 21: mod_base = OTHER; note = 2'-O-methylguanosine-3'-phosphorothioate
  modified_base 22: mod_base = OTHER; note = 2'-O-methyluridine-3'-phosphorothioate
  modified_base 23: mod_base = OTHER; note = 2'-O-methyladenosine
attaagtaatcagttagagtgta

SEQ ID NO: 1140 - RNA, 23 nt, synthetic construct
  source 1..23: mol_type = other RNA
  modified_base 1: mod_base = OTHER; note = 2'-O-methyladenosine-3'-phosphorothioate
  modified_base 2: mod_base = OTHER; note = 2'-deoxy-2'-fluoroadenosine-3'-phosphorothioate
  modified_base 3: mod_base = OTHER; note = 2'-O-methylguanosine-3'-phosphate
  modified_base 4: mod_base = OTHER; note = 2'-O-methyluridine-3'-phosphate
  modified_base 5: mod_base = OTHER; note = 2'-O-methyladenosine-3'-phosphate
  modified_base 6: mod_base = OTHER; note = 2'-deoxy-2'-fluorouridine-3'-phosphate
  modified_base 7: mod_base = OTHER; note = 2'-O-methyladenosine-3'-phosphate
  modified_base 8: mod_base = OTHER; note = 2'-deoxy-2'-fluoroadenosine-3'-phosphate
  modified_base 9: mod_base = OTHER; note = 2'-deoxy-2'-fluorocytidine-3'-phosphate
  modified_base 10: mod_base = OTHER; note = 2'-O-methyluridine-3'-phosphate
  modified_base 11: mod_base = OTHER; note = 2'-O-methyluridine-3'-phosphate
  modified_base 12: mod_base = OTHER; note = 2'-O-methylcytidine-3'-phosphate
  modified_base 13: mod_base = OTHER; note = 2'-O-methyladenosine-3'-phosphate
  modified_base 14: mod_base = OTHER; note = 2'-deoxy-2'-fluoroguanosine-3'-phosphate
  modified_base 15: mod_base = OTHER; note = 2'-O-methyluridine-3'-phosphate
  modified_base 16: mod_base = OTHER; note = 2'-deoxy-2'-fluorocytidine-3'-phosphate
  modified_base 17: mod_base = OTHER; note = 2'-O-methyluridine-3'-phosphate
  modified_base 18: mod_base = OTHER; note = 2'-O-methyladenosine-3'-phosphate
  modified_base 19: mod_base = OTHER; note = 2'-O-methyluridine-3'-phosphate
  modified_base 20: mod_base = OTHER; note = 2'-O-methyladenosine-3'-phosphate
  modified_base 21: mod_base = OTHER; note = 2'-O-methyladenosine-3'-phosphorothioate
  modified_base 22: mod_base = OTHER; note = 2'-O-methylguanosine-3'-phosphorothioate
  modified_base 23: mod_base = OTHER; note = 2'-O-methyluridine
aagtataacttcagtctataagt

SEQ ID NO: 1141 - RNA, 23 nt, synthetic construct
  source 1..23: mol_type = other RNA
  modified_base 1: mod_base = OTHER; note = 2'-O-methyladenosine-3'-phosphorothioate
  modified_base 2: mod_base = OTHER; note = 2'-deoxy-2'-fluoroadenosine-3'-phosphorothioate
  modified_base 3: mod_base = OTHER; note = 2'-O-methyluridine-3'-phosphate
  modified_base 4: mod_base = OTHER; note = 2'-O-methylcytidine-3'-phosphate
  modified_base 5: mod_base = OTHER; note = 2'-O-methyluridine-3'-phosphate
  modified_base 6: mod_base = OTHER; note = 2'-deoxy-2'-fluorouridine-3'-phosphate
  modified_base 7: mod_base = OTHER; note = 2'-O-methyladenosine-3'-phosphate
  modified_base 8: mod_base = OTHER; note = 2'-deoxy-2'-fluoroadenosine-3'-phosphate
  modified_base 9: mod_base = OTHER; note = 2'-deoxy-2'-fluoroguanosine-3'-phosphate
  modified_base 10: mod_base = OTHER; note = 2'-O-methylguanosine-3'-phosphate
  modified_base 11: mod_base = OTHER; note = 2'-O-methyladenosine-3'-phosphate
  modified_base 12: mod_base = OTHER; note = 2'-O-methylguanosine-3'-phosphate
  modified_base 13: mod_base = OTHER; note = 2'-O-methyluridine-3'-phosphate
  modified_base 14: mod_base = OTHER; note = 2'-deoxy-2'-fluoroadenosine-3'-phosphate
  modified_base 15: mod_base = OTHER; note = 2'-O-methyluridine-3'-phosphate
  modified_base 16: mod_base = OTHER; note = 2'-deoxy-2'-fluoroadenosine-3'-phosphate
  modified_base 17: mod_base = OTHER; note = 2'-O-methyladenosine-3'-phosphate
  modified_base 18: mod_base = OTHER; note = 2'-O-methylcytidine-3'-phosphate
  modified_base 19: mod_base = OTHER; note = 2'-O-methyluridine-3'-phosphate
  modified_base 20: mod_base = OTHER; note = 2'-O-methyluridine-3'-phosphate
  modified_base 21: mod_base = OTHER; note = 2'-O-methylcytidine-3'-phosphorothioate
  modified_base 22: mod_base = OTHER; note = 2'-O-methyladenosine-3'-phosphorothioate
  modified_base 23: mod_base = OTHER; note = 2'-O-methylguanosine
aatcttaaggagtataacttcag

SEQ ID NO: 1142 - RNA, 23 nt, synthetic construct
  source 1..23: mol_type = other RNA
  modified_base 1: mod_base = OTHER; note = 2'-O-methyladenosine-3'-phosphorothioate
  modified_base 2: mod_base = OTHER; note = 2'-deoxy-2'-fluorocytidine-3'-phosphorothioate
  modified_base 3: mod_base = OTHER; note = 2'-O-methyluridine-3'-phosphate
  modified_base 4: mod_base = OTHER; note = 2'-O-methylguanosine-3'-phosphate
  modified_base 5: mod_base = OTHER; note = 2'-O-methyladenosine-3'-phosphate
  modified_base 6: mod_base = OTHER; note = 2'-deoxy-2'-fluoroadenosine-3'-phosphate
  modified_base 7: mod_base = OTHER; note = 2'-O-methyladenosine-3'-phosphate
  modified_base 8: mod_base = OTHER; note = 2'-deoxy-2'-fluorouridine-3'-phosphate
  modified_base 9: mod_base = OTHER; note = 2'-deoxy-2'-fluorocytidine-3'-phosphate
  modified_base 10: mod_base = OTHER; note = 2'-O-methylcytidine-3'-phosphate
  modified_base 11: mod_base = OTHER; note = 2'-O-methyladenosine-3'-phosphate
  modified_base 12: mod_base = OTHER; note = 2'-O-methyluridine-3'-phosphate
  modified_base 13: mod_base = OTHER; note = 2'-O-methylcytidine-3'-phosphate
  modified_base 14: mod_base = OTHER; note = 2'-deoxy-2'-fluorouridine-3'-phosphate
  modified_base 15: mod_base = OTHER; note = 2'-O-methyluridine-3'-phosphate
  modified_base 16: mod_base = OTHER; note = 2'-deoxy-2'-fluoroadenosine-3'-phosphate
  modified_base 17: mod_base = OTHER; note = 2'-O-methyladenosine-3'-phosphate
  modified_base 18: mod_base = OTHER; note = 2'-O-methylguanosine-3'-phosphate
  modified_base 19: mod_base = OTHER; note = 2'-O-methylguanosine-3'-phosphate
  modified_base 20: mod_base = OTHER; note = 2'-O-methyladenosine-3'-phosphate
  modified_base 21: mod_base = OTHER; note = 2'-O-methylguanosine-3'-phosphorothioate
  modified_base 22: mod_base = OTHER; note = 2'-O-methyluridine-3'-phosphorothioate
  modified_base 23: mod_base = OTHER; note = 2'-O-methyladenosine
actgaaatccatcttaaggagta

SEQ ID NO: 1143 - RNA, 23 nt, synthetic construct
  source 1..23: mol_type = other RNA
  modified_base 1: mod_base = OTHER; note = 2'-O-methyladenosine-3'-phosphorothioate
  modified_base 2: mod_base = OTHER; note = 2'-deoxy-2'-fluorouridine-3'-phosphorothioate
  modified_base 3: mod_base = OTHER; note = 2'-O-methylcytidine-3'-phosphate
  modified_base 4: mod_base = OTHER; note = 2'-O-methyladenosine-3'-phosphate
  modified_base 5: mod_base = OTHER; note = 2'-O-methyluridine-3'-phosphate
  modified_base 6: mod_base = OTHER; note = 2'-deoxy-2'-fluoroguanosine-3'-phosphate
  modified_base 7: mod_base = OTHER; note = 2'-O-methyladenosine-3'-phosphate
  modified_base 8: mod_base = OTHER; note = 2'-deoxy-2'-fluorouridine-3'-phosphate
  modified_base 9: mod_base = OTHER; note = 2'-deoxy-2'-fluorocytidine-3'-phosphate
  modified_base 10: mod_base = OTHER; note = 2'-O-methyluridine-3'-phosphate
  modified_base 11: mod_base = OTHER; note = 2'-O-methylguanosine-3'-phosphate
  modified_base 12: mod_base = OTHER; note = 2'-O-methyladenosine-3'-phosphate
  modified_base 13: mod_base = OTHER; note = 2'-O-methyladenosine-3'-phosphate
  modified_base 14: mod_base = OTHER; note = 2'-deoxy-2'-fluoroadenosine-3'-phosphate
  modified_base 15: mod_base = OTHER; note = 2'-O-methyluridine-3'-phosphate
  modified_base 16: mod_base = OTHER; note = 2'-deoxy-2'-fluorocytidine-3'-phosphate
  modified_base 17: mod_base = OTHER; note = 2'-O-methylcytidine-3'-phosphate
  modified_base 18: mod_base = OTHER; note = 2'-O-methyladenosine-3'-phosphate
  modified_base 19: mod_base = OTHER; note = 2'-O-methyluridine-3'-phosphate
  modified_base 20: mod_base = OTHER; note = 2'-O-methylcytidine-3'-phosphate
  modified_base 21: mod_base = OTHER; note = 2'-O-methyluridine-3'-phosphorothioate
  modified_base 22: mod_base = OTHER; note = 2'-O-methyluridine-3'-phosphorothioate
  modified_base 23: mod_base = OTHER; note = 2'-O-methyladenosine
atcatgatctgaaatccatctta

SEQ ID NO: 1144 - RNA, 23 nt, synthetic construct
  source 1..23: mol_type = other RNA
  modified_base 1: mod_base = OTHER; note = 2'-O-methyladenosine-3'-phosphorothioate
  modified_base 2: mod_base = OTHER; note = 2'-deoxy-2'-fluoroadenosine-3'-phosphorothioate
  modified_base 3: mod_base = OTHER; note = 2'-O-methylguanosine-3'-phosphate
  modified_base 4: mod_base = OTHER; note = 2'-O-methyladenosine-3'-phosphate
  modified_base 5: mod_base = OTHER; note = 2'-O-methyluridine-3'-phosphate
  modified_base 6: mod_base = OTHER; note = 2'-deoxy-2'-fluoroadenosine-3'-phosphate
  modified_base 7: mod_base = OTHER; note = 2'-O-methyluridine-3'-phosphate
  modified_base 8: mod_base = OTHER; note = 2'-deoxy-2'-fluorouridine-3'-phosphate
  modified_base 9: mod_base = OTHER; note = 2'-deoxy-2'-fluorocytidine-3'-phosphate
  modified_base 10: mod_base = OTHER; note = 2'-O-methyladenosine-3'-phosphate
  modified_base 11: mod_base = OTHER; note = 2'-O-methyluridine-3'-phosphate
  modified_base 12: mod_base = OTHER; note = 2'-O-methylguanosine-3'-phosphate
  modified_base 13: mod_base = OTHER; note = 2'-O-methyladenosine-3'-phosphate
  modified_base 14: mod_base = OTHER; note = 2'-deoxy-2'-fluorouridine-3'-phosphate
  modified_base 15: mod_base = OTHER; note = 2'-O-methylcytidine-3'-phosphate
  modified_base 16: mod_base = OTHER; note = 2'-deoxy-2'-fluorouridine-3'-phosphate
  modified_base 17: mod_base = OTHER; note = 2'-O-methylguanosine-3'-phosphate
  modified_base 18: mod_base = OTHER; note = 2'-O-methyladenosine-3'-phosphate
  modified_base 19: mod_base = OTHER; note = 2'-O-methyladenosine-3'-phosphate
  modified_base 20: mod_base = OTHER; note = 2'-O-methyladenosine-3'-phosphate
  modified_base 21: mod_base = OTHER; note = 2'-O-methyluridine-3'-phosphorothioate
  modified_base 22: mod_base = OTHER; note = 2'-O-methylcytidine-3'-phosphorothioate
  modified_base 23: mod_base = OTHER; note = 2'-O-methylcytidine
aagatattcatgatctgaaatcc

SEQ ID NO: 1145 - RNA, 23 nt, synthetic construct
  source 1..23: mol_type = other RNA
  modified_base 1: mod_base = OTHER; note = 2'-O-methyladenosine-3'-phosphorothioate
  modified_base 2: mod_base = OTHER; note = 2'-deoxy-2'-fluorouridine-3'-phosphorothioate
  modified_base 3: mod_base = OTHER; note = 2'-O-methyluridine-3'-phosphate
  modified_base 4: mod_base = OTHER; note = 2'-O-methyluridine-3'-phosphate
  modified_base 5: mod_base = OTHER; note = 2'-O-methylguanosine-3'-phosphate
  modified_base 6: mod_base = OTHER; note = 2'-deoxy-2'-fluorouridine-3'-phosphate
  modified_base 7: mod_base = OTHER; note = 2'-O-methyladenosine-3'-phosphate
  modified_base 8: mod_base = OTHER; note = 2'-deoxy-2'-fluoroguanosine-3'-phosphate
  modified_base 9: mod_base = OTHER; note = 2'-deoxy-2'-fluoroadenosine-3'-phosphate
  modified_base 10: mod_base = OTHER; note = 2'-O-methylguanosine-3'-phosphate
  modified_base 11: mod_base = OTHER; note = 2'-O-methyladenosine-3'-phosphate
  modified_base 12: mod_base = OTHER; note = 2'-O-methyluridine-3'-phosphate
  modified_base 13: mod_base = OTHER; note = 2'-O-methyladenosine-3'-phosphate
  modified_base 14: mod_base = OTHER; note = 2'-deoxy-2'-fluorouridine-3'-phosphate
  modified_base 15: mod_base = OTHER; note = 2'-O-methyluridine-3'-phosphate
  modified_base 16: mod_base = OTHER; note = 2'-deoxy-2'-fluorocytidine-3'-phosphate
  modified_base 17: mod_base = OTHER; note = 2'-O-methyladenosine-3'-phosphate
  modified_base 18: mod_base = OTHER; note = 2'-O-methyluridine-3'-phosphate
  modified_base 19: mod_base = OTHER; note = 2'-O-methylguanosine-3'-phosphate
  modified_base 20: mod_base = OTHER; note = 2'-O-methyladenosine-3'-phosphate
  modified_base 21: mod_base = OTHER; note = 2'-O-methyluridine-3'-phosphorothioate
  modified_base 22: mod_base = OTHER; note = 2'-O-methylcytidine-3'-phosphorothioate
  modified_base 23: mod_base = OTHER; note = 2'-O-methyluridine
atttgtagagatattcatgatct

SEQ ID NO: 1146 - RNA, 23 nt, synthetic construct
  source 1..23: mol_type = other RNA
  modified_base 1: mod_base = OTHER; note = 2'-O-methyladenosine-3'-phosphorothioate
  modified_base 2: mod_base = OTHER; note = 2'-deoxy-2'-fluorouridine-3'-phosphorothioate
  modified_base 3: mod_base = OTHER; note = 2'-O-methyluridine-3'-phosphate
  modified_base 4: mod_base = OTHER; note = 2'-O-methyluridine-3'-phosphate
  modified_base 5: mod_base = OTHER; note = 2'-O-methylcytidine-3'-phosphate
  modified_base 6: mod_base = OTHER; note = 2'-deoxy-2'-fluorouridine-3'-phosphate
  modified_base 7: mod_base = OTHER; note = 2'-O-methyluridine-3'-phosphate
  modified_base 8: mod_base = OTHER; note = 2'-deoxy-2'-fluoroguanosine-3'-phosphate
  modified_base 9: mod_base = OTHER; note = 2'-deoxy-2'-fluorouridine-3'-phosphate
  modified_base 10: mod_base = OTHER; note = 2'-O-methyluridine-3'-phosphate
  modified_base 11: mod_base = OTHER; note = 2'-O-methyluridine-3'-phosphate
  modified_base 12: mod_base = OTHER; note = 2'-O-methylguanosine-3'-phosphate
  modified_base 13: mod_base = OTHER; note = 2'-O-methyluridine-3'-phosphate
  modified_base 14: mod_base = OTHER; note = 2'-deoxy-2'-fluoroadenosine-3'-phosphate
  modified_base 15: mod_base = OTHER; note = 2'-O-methylguanosine-3'-phosphate
  modified_base 16: mod_base = OTHER; note = 2'-deoxy-2'-fluoroadenosine-3'-phosphate
  modified_base 17: mod_base = OTHER; note = 2'-O-methylguanosine-3'-phosphate
  modified_base 18: mod_base = OTHER; note = 2'-O-methyladenosine-3'-phosphate
  modified_base 19: mod_base = OTHER; note = 2'-O-methyluridine-3'-phosphate
  modified_base 20: mod_base = OTHER; note = 2'-O-methyladenosine-3'-phosphate
  modified_base 21: mod_base = OTHER; note = 2'-O-methyluridine-3'-phosphorothioate
  modified_base 22: mod_base = OTHER; note = 2'-O-methyluridine-3'-phosphorothioate
  modified_base 23: mod_base = OTHER; note = 2'-O-methylcytidine
atttcttgtttgtagagatattc

SEQ ID NO: 1147 - RNA, 23 nt, synthetic construct
  source 1..23: mol_type = other RNA
  modified_base 1: mod_base = OTHER; note = 2'-O-methyladenosine-3'-phosphorothioate
  modified_base 2: mod_base = OTHER; note = 2'-deoxy-2'-fluorouridine-3'-phosphorothioate
  modified_base 3: mod_base = OTHER; note = 2'-O-methylcytidine-3'-phosphate
  modified_base 4: mod_base = OTHER; note = 2'-O-methyladenosine-3'-phosphate
  modified_base 5: mod_base = OTHER; note = 2'-O-methylguanosine-3'-phosphate
  modified_base 6: mod_base = OTHER; note = 2'-deoxy-2'-fluorocytidine-3'-phosphate
  modified_base 7: mod_base = OTHER; note = 2'-O-methyladenosine-3'-phosphate
  modified_base 8: mod_base = OTHER; note = 2'-deoxy-2'-fluorouridine-3'-phosphate
  modified_base 9: mod_base = OTHER; note = 2'-deoxy-2'-fluorouridine-3'-phosphate
  modified_base 10: mod_base = OTHER; note = 2'-O-methylguanosine-3'-phosphate
  modified_base 11: mod_base = OTHER; note = 2'-O-methyladenosine-3'-phosphate
  modified_base 12: mod_base = OTHER; note = 2'-O-methyladenosine-3'-phosphate
  modified_base 13: mod_base = OTHER; note = 2'-O-methyluridine-3'-phosphate
  modified_base 14: mod_base = OTHER; note = 2'-deoxy-2'-fluoroadenosine-3'-phosphate
  modified_base 15: mod_base = OTHER; note = 2'-O-methylcytidine-3'-phosphate
  modified_base 16: mod_base = OTHER; note = 2'-deoxy-2'-fluorocytidine-3'-phosphate
  modified_base 17: mod_base = OTHER; note = 2'-O-methyladenosine-3'-phosphate
  modified_base 18: mod_base = OTHER; note = 2'-O-methyladenosine-3'-phosphate
  modified_base 19: mod_base = OTHER; note = 2'-O-methylguanosine-3'-phosphate
  modified_base 20: mod_base = OTHER; note = 2'-O-methyladenosine-3'-phosphate
  modified_base 21: mod_base = OTHER; note = 2'-O-methyluridine-3'-phosphorothioate
  modified_base 22: mod_base = OTHER; note = 2'-O-methyladenosine-3'-phosphorothioate
  modified_base 23: mod_base = OTHER; note = 2'-O-methyluridine
atcagcattgaataccaagatat

SEQ ID NO: 1148 - RNA, 23 nt, synthetic construct
  source 1..23: mol_type = other RNA
  modified_base 1: mod_base = OTHER; note = 2'-O-methyladenosine-3'-phosphorothioate
  modified_base 2: mod_base = OTHER; note = 2'-deoxy-2'-fluorocytidine-3'-phosphorothioate
  modified_base 3: mod_base = OTHER; note = 2'-O-methylcytidine-3'-phosphate
  modified_base 4: mod_base = OTHER; note = 2'-O-methyladenosine-3'-phosphate
  modified_base 5: mod_base = OTHER; note = 2'-O-methyluridine-3'-phosphate
  modified_base 6: mod_base = OTHER; note = 2'-deoxy-2'-fluoroadenosine-3'-phosphate
  modified_base 7: mod_base = OTHER; note = 2'-O-methyluridine-3'-phosphate
  modified_base 8: mod_base = OTHER; note = 2'-deoxy-2'-fluorouridine-3'-phosphate
  modified_base 9: mod_base = OTHER; note = 2'-deoxy-2'-fluorocytidine-3'-phosphate
  modified_base 10: mod_base = OTHER; note = 2'-O-methyladenosine-3'-phosphate
  modified_base 11: mod_base = OTHER; note = 2'-O-methylguanosine-3'-phosphate
  modified_base 12: mod_base = OTHER; note = 2'-O-methylcytidine-3'-phosphate
  modified_base 13: mod_base = OTHER; note = 2'-O-methyladenosine-3'-phosphate
  modified_base 14: mod_base = OTHER; note = 2'-deoxy-2'-fluorouridine-3'-phosphate
  modified_base 15: mod_base = OTHER; note = 2'-O-methyluridine-3'-phosphate
  modified_base 16: mod_base = OTHER; note = 2'-deoxy-2'-fluoroguanosine-3'-phosphate
  modified_base 17: mod_base = OTHER; note = 2'-O-methyladenosine-3'-phosphate
  modified_base 18: mod_base = OTHER; note = 2'-O-methyladenosine-3'-phosphate
  modified_base 19: mod_base = OTHER; note = 2'-O-methyluridine-3'-phosphate
  modified_base 20: mod_base = OTHER; note = 2'-O-methyladenosine-3'-phosphate
  modified_base 21: mod_base = OTHER; note = 2'-O-methylcytidine-3'-phosphorothioate
  modified_base 22: mod_base = OTHER; note = 2'-O-methylcytidine-3'-phosphorothioate
  modified_base 23: mod_base = OTHER; note = 2'-O-methyladenosine
accatattcagcattgaatacca

SEQ ID NO: 1149 - RNA, 23 nt, synthetic construct
  source 1..23: mol_type = other RNA
  modified_base 1: mod_base = OTHER; note = 2'-O-methyladenosine-3'-phosphorothioate
  modified_base 2: mod_base = OTHER; note = 2'-deoxy-2'-fluorocytidine-3'-phosphorothioate
  modified_base 3: mod_base = OTHER; note = 2'-O-methyluridine-3'-phosphate
  modified_base 4: mod_base = OTHER; note = 2'-O-methylguanosine-3'-phosphate
  modified_base 5: mod_base = OTHER; note = 2'-O-methyluridine-3'-phosphate
  modified_base 6: mod_base = OTHER; note = 2'-deoxy-2'-fluorouridine-3'-phosphate
  modified_base 7: mod_base = OTHER; note = 2'-O-methyluridine-3'-phosphate
  modified_base 8: mod_base = OTHER; note = 2'-deoxy-2'-fluorocytidine-3'-phosphate
  modified_base 9: mod_base = OTHER; note = 2'-deoxy-2'-fluorocytidine-3'-phosphate
  modified_base 10: mod_base = OTHER; note = 2'-O-methyladenosine-3'-phosphate
  modified_base 11: mod_base = OTHER; note = 2'-O-methyluridine-3'-phosphate
  modified_base 12: mod_base = OTHER; note = 2'-O-methyladenosine-3'-phosphate
  modified_base 13: mod_base = OTHER; note = 2'-O-methyluridine-3'-phosphate
  modified_base 14: mod_base = OTHER; note = 2'-deoxy-2'-fluorouridine-3'-phosphate
  modified_base 15: mod_base = OTHER; note = 2'-O-methylcytidine-3'-phosphate
  modified_base 16: mod_base = OTHER; note = 2'-deoxy-2'-fluoroadenosine-3'-phosphate
  modified_base 17: mod_base = OTHER; note = 2'-O-methylguanosine-3'-phosphate
  modified_base 18: mod_base = OTHER; note = 2'-O-methylcytidine-3'-phosphate
  modified_base 19: mod_base = OTHER; note = 2'-O-methyladenosine-3'-phosphate
  modified_base 20: mod_base = OTHER; note = 2'-O-methyluridine-3'-phosphate
  modified_base 21: mod_base = OTHER; note = 2'-O-methyluridine-3'-phosphorothioate
  modified_base 22: mod_base = OTHER; note = 2'-O-methylguanosine-3'-phosphorothioate
  modified_base 23: mod_base = OTHER; note = 2'-O-methyladenosine
actgtttccatattcagcattga

SEQ ID NO: 1150 - RNA, 23 nt, synthetic construct
  source 1..23: mol_type = other RNA
  modified_base 1: mod_base = OTHER; note = 2'-O-methyladenosine-3'-phosphorothioate
  modified_base 2: mod_base = OTHER; note = 2'-deoxy-2'-fluoroadenosine-3'-phosphorothioate
  modified_base 3: mod_base = OTHER; note = 2'-O-methyladenosine-3'-phosphate
  modified_base 4: mod_base = OTHER; note = 2'-O-methylcytidine-3'-phosphate
  modified_base 5: mod_base = OTHER; note = 2'-O-methyluridine-3'-phosphate
  modified_base 6: mod_base = OTHER; note = 2'-deoxy-2'-fluoroguanosine-3'-phosphate
  modified_base 7: mod_base = OTHER; note = 2'-O-methyladenosine-3'-phosphate
  modified_base 8: mod_base = OTHER; note = 2'-deoxy-2'-fluoroguanosine-3'-phosphate
  modified_base 9: mod_base = OTHER; note = 2'-deoxy-2'-fluorocytidine-3'-phosphate
  modified_base 10: mod_base = OTHER; note = 2'-O-methyluridine-3'-phosphate
  modified_base 11: mod_base = OTHER; note = 2'-O-methylguanosine-3'-phosphate
  modified_base 12: mod_base = OTHER; note = 2'-O-methyluridine-3'-phosphate
  modified_base 13: mod_base = OTHER; note = 2'-O-methyluridine-3'-phosphate
  modified_base 14: mod_base = OTHER; note = 2'-deoxy-2'-fluorouridine-3'-phosphate
  modified_base 15: mod_base = OTHER; note = 2'-O-methylcytidine-3'-phosphate
  modified_base 16: mod_base = OTHER; note = 2'-deoxy-2'-fluorocytidine-3'-phosphate
  modified_base 17: mod_base = OTHER; note = 2'-O-methyladenosine-3'-phosphate
  modified_base 18: mod_base = OTHER; note = 2'-O-methyluridine-3'-phosphate
  modified_base 19: mod_base = OTHER; note = 2'-O-methyladenosine-3'-phosphate
  modified_base 20: mod_base = OTHER; note = 2'-O-methyluridine-3'-phosphate
  modified_base 21: mod_base = OTHER; note = 2'-O-methyluridine-3'-phosphorothioate
  modified_base 22: mod_base = OTHER; note = 2'-O-methylcytidine-3'-phosphorothioate
  modified_base 23: mod_base = OTHER; note = 2'-O-methyladenosine
aaactgagctgtttccatattca

SEQ ID NO: 1151 - RNA, 23 nt, synthetic construct
  source 1..23: mol_type = other RNA
  modified_base 1: mod_base = OTHER; note = 2'-O-methyladenosine-3'-phosphorothioate
  modified_base 2: mod_base = OTHER; note = 2'-deoxy-2'-fluorocytidine-3'-phosphorothioate
  modified_base 3: mod_base = OTHER; note = 2'-O-methyladenosine-3'-phosphate
  modified_base 4: mod_base = OTHER; note = 2'-O-methyladenosine-3'-phosphate
  modified_base 5: mod_base = OTHER; note = 2'-O-methylguanosine-3'-phosphate
  modified_base 6: mod_base = OTHER; note = 2'-deoxy-2'-fluoroadenosine-3'-phosphate
  modified_base 7: mod_base = OTHER; note = 2'-O-methyladenosine-3'-phosphate
  modified_base 8: mod_base = OTHER; note = 2'-deoxy-2'-fluoroadenosine-3'-phosphate
  modified_base 9: mod_base = OTHER; note = 2'-deoxy-2'-fluoroadenosine-3'-phosphate
  modified_base 10: mod_base = OTHER; note = 2'-O-methylcytidine-3'-phosphate
  modified_base 11: mod_base = OTHER; note = 2'-O-methyluridine-3'-phosphate
  modified_base 12: mod_base = OTHER; note = 2'-O-methylguanosine-3'-phosphate
  modified_base 13: mod_base = OTHER; note = 2'-O-methyladenosine-3'-phosphate
  modified_base 14: mod_base = OTHER; note = 2'-deoxy-2'-fluoroguanosine-3'-phosphate
  modified_base 15: mod_base = OTHER; note = 2'-O-methylcytidine-3'-phosphate
  modified_base 16: mod_base = OTHER; note = 2'-deoxy-2'-fluorouridine-3'-phosphate
  modified_base 17: mod_base = OTHER; note = 2'-O-methylguanosine-3'-phosphate
  modified_base 18: mod_base = OTHER; note = 2'-O-methyluridine-3'-phosphate
  modified_base 19: mod_base = OTHER; note = 2'-O-methyluridine-3'-phosphate
  modified_base 20: mod_base = OTHER; note = 2'-O-methyluridine-3'-phosphate
  modified_base 21: mod_base = OTHER; note = 2'-O-methylcytidine-3'-phosphorothioate
  modified_base 22: mod_base = OTHER; note = 2'-O-methylcytidine-3'-phosphorothioate
  modified_base 23: mod_base = OTHER; note = 2'-O-methyladenosine
acaagaaaactgagctgtttcca

SEQ ID NO: 1152 - RNA, 23 nt, synthetic construct
  source 1..23: mol_type = other RNA
  modified_base 1: mod_base = OTHER; note = 2'-O-methyladenosine-3'-phosphorothioate
  modified_base 2: mod_base = OTHER; note = 2'-deoxy-2'-fluorouridine-3'-phosphorothioate
  modified_base 3: mod_base = OTHER; note = 2'-O-methyladenosine-3'-phosphate
  modified_base 4: mod_base = OTHER; note = 2'-O-methylcytidine-3'-phosphate
  modified_base 5: mod_base = OTHER; note = 2'-O-methyluridine-3'-phosphate
  modified_base 6: mod_base = OTHER; note = 2'-deoxy-2'-fluoroguanosine-3'-phosphate
  modified_base 7: mod_base = OTHER; note = 2'-O-methyluridine-3'-phosphate
  modified_base 8: mod_base = OTHER; note = 2'-deoxy-2'-fluorouridine-3'-phosphate
  modified_base 9: mod_base = OTHER; note = 2'-deoxy-2'-fluorocytidine-3'-phosphate
  modified_base 10: mod_base = OTHER; note = 2'-O-methyluridine-3'-phosphate
  modified_base 11: mod_base = OTHER; note = 2'-O-methylcytidine-3'-phosphate
  modified_base 12: mod_base = OTHER; note = 2'-O-methylcytidine-3'-phosphate
  modified_base 13: mod_base = OTHER; note = 2'-O-methyladenosine-3'-phosphate
  modified_base 14: mod_base = OTHER; note = 2'-deoxy-2'-fluoroadenosine-3'-phosphate
  modified_base 15: mod_base = OTHER; note = 2'-O-methylguanosine-3'-phosphate
  modified_base 16: mod_base = OTHER; note = 2'-deoxy-2'-fluoroadenosine-3'-phosphate
  modified_base 17: mod_base = OTHER; note = 2'-O-methyladenosine-3'-phosphate
  modified_base 18: mod_base = OTHER; note = 2'-O-methyladenosine-3'-phosphate
  modified_base 19: mod_base = OTHER; note = 2'-O-methyladenosine-3'-phosphate
  modified_base 20: mod_base = OTHER; note = 2'-O-methylcytidine-3'-phosphate
  modified_base 21: mod_base = OTHER; note = 2'-O-methyluridine-3'-phosphorothioate
  modified_base 22: mod_base = OTHER; note = 2'-O-methylguanosine-3'-phosphorothioate
  modified_base 23: mod_base = OTHER; note = 2'-O-methyladenosine
atactgttctccaagaaaactga

SEQ ID NO: 1153 - RNA, 23 nt, synthetic construct
  source 1..23: mol_type = other RNA
  modified_base 1: mod_base = OTHER; note = 2'-O-methyladenosine-3'-phosphorothioate
  modified_base 2: mod_base = OTHER; note = 2'-deoxy-2'-fluorocytidine-3'-phosphorothioate
  modified_base 3: mod_base = OTHER; note = 2'-O-methyladenosine-3'-phosphate
  modified_base 4: mod_base = OTHER; note = 2'-O-methyluridine-3'-phosphate
  modified_base 5: mod_base = OTHER; note = 2'-O-methylcytidine-3'-phosphate
  modified_base 6: mod_base = OTHER; note = 2'-deoxy-2'-fluoroadenosine-3'-phosphate
  modified_base 7: mod_base = OTHER; note = 2'-O-methyladenosine-3'-phosphate
  modified_base 8: mod_base = OTHER; note = 2'-deoxy-2'-fluoroadenosine-3'-phosphate
  modified_base 9: mod_base = OTHER; note = 2'-deoxy-2'-fluorouridine-3'-phosphate
  modified_base 10: mod_base = OTHER; note = 2'-O-methylguanosine-3'-phosphate
  modified_base 11: mod_base = OTHER; note = 2'-O-methyluridine-3'-phosphate
  modified_base 12: mod_base = OTHER; note = 2'-O-methyladenosine-3'-phosphate
  modified_base 13: mod_base = OTHER; note = 2'-O-methylcytidine-3'-phosphate
  modified_base 14: mod_base = OTHER; note = 2'-deoxy-2'-fluorouridine-3'-phosphate
  modified_base 15: mod_base = OTHER; note = 2'-O-methylguanosine-3'-phosphate
  modified_base 16: mod_base = OTHER; note = 2'-deoxy-2'-fluorouridine-3'-phosphate
  modified_base 17: mod_base = OTHER; note = 2'-O-methyluridine-3'-phosphate
  modified_base 18: mod_base = OTHER; note = 2'-O-methylcytidine-3'-phosphate
  modified_base 19: mod_base = OTHER; note = 2'-O-methyluridine-3'-phosphate
  modified_base 20: mod_base = OTHER; note = 2'-O-methylcytidine-3'-phosphate
  modified_base 21: mod_base = OTHER; note = 2'-O-methylcytidine-3'-phosphorothioate
  modified_base 22: mod_base = OTHER; note = 2'-O-methyladenosine-3'-phosphorothioate
  modified_base 23: mod_base = OTHER; note = 2'-O-methyladenosine
acatcaaatgtactgttctccaa

SEQ ID NO: 1154 - RNA, 23 nt, synthetic construct
  source 1..23: mol_type = other RNA
  modified_base 1: mod_base = OTHER; note = 2'-O-methyladenosine-3'-phosphorothioate
  modified_base 2: mod_base = OTHER; note = 2'-deoxy-2'-fluorocytidine-3'-phosphorothioate
  modified_base 3: mod_base = OTHER; note = 2'-O-methyladenosine-3'-phosphate
  modified_base 4: mod_base = OTHER; note = 2'-O-methyladenosine-3'-phosphate
  modified_base 5: mod_base = OTHER; note = 2'-O-methyladenosine-3'-phosphate
  modified_base 6: mod_base = OTHER; note = 2'-deoxy-2'-fluorocytidine-3'-phosphate
  modified_base 7: mod_base = OTHER; note = 2'-O-methyluridine-3'-phosphate
  modified_base 8: mod_base = OTHER; note = 2'-deoxy-2'-fluorocytidine-3'-phosphate
  modified_base 9: mod_base = OTHER; note = 2'-deoxy-2'-fluoroadenosine-3'-phosphate
  modified_base 10: mod_base = OTHER; note = 2'-O-methyluridine-3'-phosphate
  modified_base 11: mod_base = OTHER; note = 2'-O-methylcytidine-3'-phosphate
  modified_base 12: mod_base = OTHER; note = 2'-O-methyladenosine-3'-phosphate
  modified_base 13: mod_base = OTHER; note = 2'-O-methyladenosine-3'-phosphate
  modified_base 14: mod_base = OTHER; note = 2'-deoxy-2'-fluoroadenosine-3'-phosphate
  modified_base 15: mod_base = OTHER; note = 2'-O-methyluridine-3'-phosphate
  modified_base 16: mod_base = OTHER; note = 2'-deoxy-2'-fluoroguanosine-3'-phosphate
  modified_base 17: mod_base = OTHER; note = 2'-O-methyluridine-3'-phosphate
  modified_base 18: mod_base = OTHER; note = 2'-O-methyladenosine-3'-phosphate
  modified_base 19: mod_base = OTHER; note = 2'-O-methylcytidine-3'-phosphate
  modified_base 20: mod_base = OTHER; note = 2'-O-methyluridine-3'-phosphate
  modified_base 21: mod_base = OTHER; note = 2'-O-methylguanosine-3'-phosphorothioate
  modified_base 22: mod_base = OTHER; note = 2'-O-methyluridine-3'-phosphorothioate
  modified_base 23: mod_base = OTHER; note = 2'-O-methyluridine
acaaactcatcaaatgtactgtt

SEQ ID NO: 1155 - RNA, 23 nt, synthetic construct
  source 1..23: mol_type = other RNA
  modified_base 1: mod_base = OTHER; note = 2'-O-methyladenosine-3'-phosphorothioate
  modified_base 2: mod_base = OTHER; note = 2'-deoxy-2'-fluoroadenosine-3'-phosphorothioate
  modified_base 3: mod_base = OTHER; note = 2'-O-methylguanosine-3'-phosphate
  modified_base 4: mod_base = OTHER; note = 2'-O-methyladenosine-3'-phosphate
  modified_base 5: mod_base = OTHER; note = 2'-O-methyladenosine-3'-phosphate
  modified_base 6: mod_base = OTHER; note = 2'-deoxy-2'-fluorouridine-3'-phosphate
  modified_base 7: mod_base = OTHER; note = 2'-O-methylguanosine-3'-phosphate
  modified_base 8: mod_base = OTHER; note = 2'-deoxy-2'-fluorouridine-3'-phosphate
  modified_base 9: mod_base = OTHER; note = 2'-deoxy-2'-fluorocytidine-3'-phosphate
  modified_base 10: mod_base = OTHER; note = 2'-O-methylcytidine-3'-phosphate
  modified_base 11: mod_base = OTHER; note = 2'-O-methyladenosine-3'-phosphate
  modified_base 12: mod_base = OTHER; note = 2'-O-methyladenosine-3'-phosphate
  modified_base 13: mod_base = OTHER; note = 2'-O-methyladenosine-3'-phosphate
  modified_base 14: mod_base = OTHER; note = 2'-deoxy-2'-fluorocytidine-3'-phosphate
  modified_base 15: mod_base = OTHER; note = 2'-O-methyluridine-3'-phosphate
  modified_base 16: mod_base = OTHER; note = 2'-deoxy-2'-fluorocytidine-3'-phosphate
  modified_base 17: mod_base = OTHER; note = 2'-O-methyladenosine-3'-phosphate
  modified_base 18: mod_base = OTHER; note = 2'-O-methyluridine-3'-phosphate
  modified_base 19: mod_base = OTHER; note = 2'-O-methylcytidine-3'-phosphate
  modified_base 20: mod_base = OTHER; note = 2'-O-methyladenosine-3'-phosphate
  modified_base 21: mod_base = OTHER; note = 2'-O-methyladenosine-3'-phosphorothioate
  modified_base 22: mod_base = OTHER; note = 2'-O-methyladenosine-3'-phosphorothioate
  modified_base 23: mod_base = OTHER; note = 2'-O-methyluridine
aagaatgtccaaactcatcaaat

SEQ ID NO: 1156 - RNA, 23 nt, synthetic construct
  source 1..23: mol_type = other RNA
  modified_base 1: mod_base = OTHER; note = 2'-O-methyladenosine-3'-phosphorothioate
  modified_base 2: mod_base = OTHER; note = 2'-deoxy-2'-fluoroadenosine-3'-phosphorothioate
  modified_base 3: mod_base = OTHER; note = 2'-O-methyluridine-3'-phosphate
  modified_base 4: mod_base = OTHER; note = 2'-O-methyluridine-3'-phosphate
  modified_base 5: mod_base = OTHER; note = 2'-O-methylguanosine-3'-phosphate
  modified_base 6: mod_base = OTHER; note = 2'-deoxy-2'-fluoroadenosine-3'-phosphate
  modified_base 7: mod_base = OTHER; note = 2'-O-methyluridine-3'-phosphate
  modified_base 8: mod_base = OTHER; note = 2'-deoxy-2'-fluoroadenosine-3'-phosphate
  modified_base 9: mod_base = OTHER; note = 2'-deoxy-2'-fluoroguanosine-3'-phosphate
  modified_base 10: mod_base = OTHER; note = 2'-O-methyladenosine-3'-phosphate
  modified_base 11: mod_base = OTHER; note = 2'-O-methyladenosine-3'-phosphate
  modified_base 12: mod_base = OTHER; note = 2'-O-methyluridine-3'-phosphate
  modified_base 13: mod_base = OTHER; note = 2'-O-methylguanosine-3'-phosphate
  modified_base 14: mod_base = OTHER; note = 2'-deoxy-2'-fluorouridine-3'-phosphate
  modified_base 15: mod_base = OTHER; note = 2'-O-methylcytidine-3'-phosphate
  modified_base 16: mod_base = OTHER; note = 2'-deoxy-2'-fluorocytidine-3'-phosphate
  modified_base 17: mod_base = OTHER; note = 2'-O-methyladenosine-3'-phosphate
  modified_base 18: mod_base = OTHER; note = 2'-O-methyladenosine-3'-phosphate
  modified_base 19: mod_base = OTHER; note = 2'-O-methyladenosine-3'-phosphate
  modified_base 20: mod_base = OTHER; note = 2'-O-methylcytidine-3'-phosphate
  modified_base 21: mod_base = OTHER; note = 2'-O-methyluridine-3'-phosphorothioate
  modified_base 22: mod_base = OTHER; note = 2'-O-methylcytidine-3'-phosphorothioate
  modified_base 23: mod_base = OTHER; note = 2'-O-methyladenosine
aattgatagaatgtccaaactca

SEQ ID NO: 1157 - RNA, 23 nt, synthetic construct
  source 1..23: mol_type = other RNA
  modified_base 1: mod_base = OTHER; note = 2'-O-methyladenosine-3'-phosphorothioate
  modified_base 2: mod_base = OTHER; note = 2'-deoxy-2'-fluoroadenosine-3'-phosphorothioate
  modified_base 3: mod_base = OTHER; note = 2'-O-methyluridine-3'-phosphate
  modified_base 4: mod_base = OTHER; note = 2'-O-methyladenosine-3'-phosphate
  modified_base 5: mod_base = OTHER; note = 2'-O-methyladenosine-3'-phosphate
  modified_base 6: mod_base = OTHER; note = 2'-deoxy-2'-fluorouridine-3'-phosphate
  modified_base 7: mod_base = OTHER; note = 2'-O-methylcytidine-3'-phosphate
  modified_base 8: mod_base = OTHER; note = 2'-deoxy-2'-fluoroadenosine-3'-phosphate
  modified_base 9: mod_base = OTHER; note = 2'-deoxy-2'-fluorouridine-3'-phosphate
  modified_base 10: mod_base = OTHER; note = 2'-O-methyluridine-3'-phosphate
  modified_base 11: mod_base = OTHER; note = 2'-O-methylguanosine-3'-phosphate
  modified_base 12: mod_base = OTHER; note = 2'-O-methyladenosine-3'-phosphate
  modified_base 13: mod_base = OTHER; note = 2'-O-methyluridine-3'-phosphate
  modified_base 14: mod_base = OTHER; note = 2'-deoxy-2'-fluoroadenosine-3'-phosphate
  modified_base 15: mod_base = OTHER; note = 2'-O-methylguanosine-3'-phosphate
  modified_base 16: mod_base = OTHER; note = 2'-deoxy-2'-fluoroadenosine-3'-phosphate
  modified_base 17: mod_base = OTHER; note = 2'-O-methyladenosine-3'-phosphate
  modified_base 18: mod_base = OTHER; note = 2'-O-methyluridine-3'-phosphate
  modified_base 19: mod_base = OTHER; note = 2'-O-methylguanosine-3'-phosphate
  modified_base 20: mod_base = OTHER; note = 2'-O-methyluridine-3'-phosphate
  modified_base 21: mod_base = OTHER; note = 2'-O-methylcytidine-3'-phosphorothioate
  modified_base 22: mod_base = OTHER; note = 2'-O-methylcytidine-3'-phosphorothioate
  modified_base 23: mod_base = OTHER; note = 2'-O-methyladenosine
aataatcattgatagaatgtcca

SEQ ID NO: 1158 - RNA, 23 nt, synthetic construct
  source 1..23: mol_type = other RNA
  modified_base 1: mod_base = OTHER; note = 2'-O-methyladenosine-3'-phosphorothioate
  modified_base 2: mod_base = OTHER; note = 2'-deoxy-2'-fluoroadenosine-3'-phosphorothioate
  modified_base 3: mod_base = OTHER; note = 2'-O-methylguanosine-3'-phosphate
  modified_base 4: mod_base = OTHER; note = 2'-O-methylguanosine-3'-phosphate
  modified_base 5: mod_base = OTHER; note = 2'-O-methyladenosine-3'-phosphate
  modified_base 6: mod_base = OTHER; note = 2'-deoxy-2'-fluoroguanosine-3'-phosphate
  modified_base 7: mod_base = OTHER; note = 2'-O-methyladenosine-3'-phosphate
  modified_base 8: mod_base = OTHER; note = 2'-deoxy-2'-fluorouridine-3'-phosphate
  modified_base 9: mod_base = OTHER; note = 2'-deoxy-2'-fluoroadenosine-3'-phosphate
  modified_base 10: mod_base = OTHER; note = 2'-O-methyluridine-3'-phosphate
  modified_base 11: mod_base = OTHER; note = 2'-O-methyluridine-3'-phosphate
  modified_base 12: mod_base = OTHER; note = 2'-O-methylguanosine-3'-phosphate
  modified_base 13: mod_base = OTHER; note = 2'-O-methyladenosine-3'-phosphate
  modified_base 14: mod_base = OTHER; note = 2'-deoxy-2'-fluoroadenosine-3'-phosphate
  modified_base 15: mod_base = OTHER; note = 2'-O-methyluridine-3'-phosphate
  modified_base 16: mod_base = OTHER; note = 2'-deoxy-2'-fluoroadenosine-3'-phosphate
  modified_base 17: mod_base = OTHER; note = 2'-O-methyladenosine-3'-phosphate
  modified_base 18: mod_base = OTHER; note = 2'-O-methyluridine-3'-phosphate
  modified_base 19: mod_base = OTHER; note = 2'-O-methylcytidine-3'-phosphate
  modified_base 20: mod_base = OTHER; note = 2'-O-methyladenosine-3'-phosphate
  modified_base 21: mod_base = OTHER; note = 2'-O-methyluridine-3'-phosphorothioate
  modified_base 22: mod_base = OTHER; note = 2'-O-methyluridine-3'-phosphorothioate
  modified_base 23: mod_base = OTHER; note = 2'-O-methylguanosine
aaggagatattgaataatcattg

SEQ ID NO: 1159 - RNA, 23 nt, synthetic construct
  source 1..23: mol_type = other RNA
  modified_base 1: mod_base = OTHER; note = 2'-O-methyladenosine-3'-phosphorothioate
  modified_base 2: mod_base = OTHER; note = 2'-deoxy-2'-fluoroadenosine-3'-phosphorothioate
  modified_base 3: mod_base = OTHER; note = 2'-O-methylguanosine-3'-phosphate
  modified_base 4: mod_base = OTHER; note = 2'-O-methyladenosine-3'-phosphate
  modified_base 5: mod_base = OTHER; note = 2'-O-methyladenosine-3'-phosphate
  modified_base 6: mod_base = OTHER; note = 2'-deoxy-2'-fluorouridine-3'-phosphate
  modified_base 7: mod_base = OTHER; note = 2'-O-methyladenosine-3'-phosphate
  modified_base 8: mod_base = OTHER; note = 2'-deoxy-2'-fluoroadenosine-3'-phosphate
  modified_base 9: mod_base = OTHER; note = 2'-deoxy-2'-fluoroadenosine-3'-phosphate
  modified_base 10: mod_base = OTHER; note = 2'-O-methylcytidine-3'-phosphate
  modified_base 11: mod_base = OTHER; note = 2'-O-methyluridine-3'-phosphate
  modified_base 12: mod_base = OTHER; note = 2'-O-methylguanosine-3'-phosphate
  modified_base 13: mod_base = OTHER; note = 2'-O-methylcytidine-3'-phosphate
  modified_base 14: mod_base = OTHER; note = 2'-deoxy-2'-fluorocytidine-3'-phosphate
  modified_base 15: mod_base = OTHER; note = 2'-O-methylcytidine-3'-phosphate
  modified_base 16: mod_base = OTHER; note = 2'-deoxy-2'-fluoroadenosine-3'-phosphate
  modified_base 17: mod_base = OTHER; note = 2'-O-methyluridine-3'-phosphate
  modified_base 18: mod_base = OTHER; note = 2'-O-methylcytidine-3'-phosphate
  modified_base 19: mod_base = OTHER; note = 2'-O-methyladenosine-3'-phosphate
  modified_base 20: mod_base = OTHER; note = 2'-O-methylguanosine-3'-phosphate
  modified_base 21: mod_base = OTHER; note = 2'-O-methylguanosine-3'-phosphorothioate
  modified_base 22: mod_base = OTHER; note = 2'-O-methyladenosine-3'-phosphorothioate
  modified_base 23: mod_base = OTHER; note = 2'-O-methylguanosine
aagaataaactgcccatcaggag

SEQ ID NO: 1160 - RNA, 23 nt, synthetic construct
  source 1..23: mol_type = other RNA
  modified_base 1: mod_base = OTHER; note = 2'-O-methyladenosine-3'-phosphorothioate
  modified_base 2: mod_base = OTHER; note = 2'-deoxy-2'-fluoroadenosine-3'-phosphorothioate
  modified_base 3: mod_base = OTHER; note = 2'-O-methyluridine-3'-phosphate
  modified_base 4: mod_base = OTHER; note = 2'-O-methyluridine-3'-phosphate
  modified_base 5: mod_base = OTHER; note = 2'-O-methylcytidine-3'-phosphate
  modified_base 6: mod_base = OTHER; note = 2'-deoxy-2'-fluorouridine-3'-phosphate
  modified_base 7: mod_base = OTHER; note = 2'-O-methyladenosine-3'-phosphate
  modified_base 8: mod_base = OTHER; note = 2'-deoxy-2'-fluoroadenosine-3'-phosphate
  modified_base 9: mod_base = OTHER; note = 2'-deoxy-2'-fluoroguanosine-3'-phosphate
  modified_base 10: mod_base = OTHER; note = 2'-O-methyladenosine-3'-phosphate
  modified_base 11: mod_base = OTHER; note = 2'-O-methylguanosine-3'-phosphate
  modified_base 12: mod_base = OTHER; note = 2'-O-methyladenosine-3'-phosphate
  modified_base 13: mod_base = OTHER; note = 2'-O-methyladenosine-3'-phosphate
  modified_base 14: mod_base = OTHER; note = 2'-deoxy-2'-fluorouridine-3'-phosphate
  modified_base 15: mod_base = OTHER; note = 2'-O-methyladenosine-3'-phosphate
  modified_base 16: mod_base = OTHER; note = 2'-deoxy-2'-fluoroadenosine-3'-phosphate
  modified_base 17: mod_base = OTHER; note = 2'-O-methyladenosine-3'-phosphate
  modified_base 18: mod_base = OTHER; note = 2'-O-methylcytidine-3'-phosphate
  modified_base 19: mod_base = OTHER; note = 2'-O-methyluridine-3'-phosphate
  modified_base 20: mod_base = OTHER; note = 2'-O-methylguanosine-3'-phosphate
  modified_base 21: mod_base = OTHER; note = 2'-O-methylcytidine-3'-phosphorothioate
  modified_base 22: mod_base = OTHER; note = 2'-O-methylcytidine-3'-phosphorothioate
  modified_base 23: mod_base = OTHER; note = 2'-O-methylcytidine
aattctaagagaataaactgccc

SEQ ID NO: 1161 - RNA, 23 nt, synthetic construct
  source 1..23: mol_type = other RNA
  modified_base 1: mod_base = OTHER; note = 2'-O-methyladenosine-3'-phosphorothioate
  modified_base 2: mod_base = OTHER; note = 2'-deoxy-2'-fluoroadenosine-3'-phosphorothioate
  modified_base 3: mod_base = OTHER; note = 2'-O-methylcytidine-3'-phosphate
  modified_base 4: mod_base = OTHER; note = 2'-O-methylguanosine-3'-phosphate
  modified_base 5: mod_base = OTHER; note = 2'-O-methyluridine-3'-phosphate
  modified_base 6: mod_base = OTHER; note = 2'-deoxy-2'-fluoroadenosine-3'-phosphate
  modified_base 7: mod_base = OTHER; note = 2'-O-methylguanosine-3'-phosphate
  modified_base 8: mod_base = OTHER; note = 2'-deoxy-2'-fluorouridine-3'-phosphate
  modified_base 9: mod_base = OTHER; note = 2'-deoxy-2'-fluorouridine-3'-phosphate
  modified_base 10: mod_base = OTHER; note = 2'-O-methylguanosine-3'-phosphate
  modified_base 11: mod_base = OTHER; note = 2'-O-methyluridine-3'-phosphate
  modified_base 12: mod_base = OTHER; note = 2'-O-methyladenosine-3'-phosphate
  modified_base 13: mod_base = OTHER; note = 2'-O-methyluridine-3'-phosphate
  modified_base 14: mod_base = OTHER; note = 2'-deoxy-2'-fluorouridine-3'-phosphate
  modified_base 15: mod_base = OTHER; note = 2'-O-methylcytidine-3'-phosphate
  modified_base 16: mod_base = OTHER; note = 2'-deoxy-2'-fluorouridine-3'-phosphate
  modified_base 17: mod_base = OTHER; note = 2'-O-methyladenosine-3'-phosphate
  modified_base 18: mod_base = OTHER; note = 2'-O-methyladenosine-3'-phosphate
  modified_base 19: mod_base = OTHER; note = 2'-O-methylguanosine-3'-phosphate
  modified_base 20: mod_base = OTHER; note = 2'-O-methyladenosine-3'-phosphate
  modified_base 21: mod_base = OTHER; note = 2'-O-methylguanosine-3'-phosphorothioate
  modified_base 22: mod_base = OTHER; note = 2'-O-methyladenosine-3'-phosphorothioate
  modified_base 23: mod_base = OTHER; note = 2'-O-methyladenosine
aacgtagttgtattctaagagaa

SEQ ID NO: 1162 - RNA, 23 nt, synthetic construct
  source 1..23: mol_type = other RNA
  modified_base 1: mod_base = OTHER; note = 2'-O-methyladenosine-3'-phosphorothioate
  modified_base 2: mod_base = OTHER; note = 2'-deoxy-2'-fluoroadenosine-3'-phosphorothioate
  modified_base 3: mod_base = OTHER; note = 2'-O-methyluridine-3'-phosphate
  modified_base 4: mod_base = OTHER; note = 2'-O-methyluridine-3'-phosphate
  modified_base 5: mod_base = OTHER; note = 2'-O-methylguanosine-3'-phosphate
  modified_base 6: mod_base = OTHER; note = 2'-deoxy-2'-fluorocytidine-3'-phosphate
  modified_base 7: mod_base = OTHER; note = 2'-O-methyluridine-3'-phosphate
  modified_base 8: mod_base = OTHER; note = 2'-deoxy-2'-fluorouridine-3'-phosphate
  modified_base 9: mod_base = OTHER; note = 2'-deoxy-2'-fluorocytidine-3'-phosphate
  modified_base 10: mod_base = OTHER; note = 2'-O-methyladenosine-3'-phosphate
  modified_base 11: mod_base = OTHER; note = 2'-O-methylcytidine-3'-phosphate
  modified_base 12: mod_base = OTHER; note = 2'-O-methylguanosine-3'-phosphate
  modified_base 13: mod_base = OTHER; note = 2'-O-methyluridine-3'-phosphate
  modified_base 14: mod_base = OTHER; note = 2'-deoxy-2'-fluoroadenosine-3'-phosphate
  modified_base 15: mod_base = OTHER; note = 2'-O-methylguanosine-3'-phosphate
  modified_base 16: mod_base = OTHER; note = 2'-deoxy-2'-fluorouridine-3'-phosphate
  modified_base 17: mod_base = OTHER; note = 2'-O-methyluridine-3'-phosphate
  modified_base 18: mod_base = OTHER; note = 2'-O-methylguanosine-3'-phosphate
  modified_base 19: mod_base = OTHER; note = 2'-O-methyluridine-3'-phosphate
  modified_base 20: mod_base = OTHER; note = 2'-O-methyladenosine-3'-phosphate
  modified_base 21: mod_base = OTHER; note = 2'-O-methyluridine-3'-phosphorothioate
  modified_base 22: mod_base = OTHER; note = 2'-O-methyluridine-3'-phosphorothioate
  modified_base 23: mod_base = OTHER; note = 2'-O-methylcytidine
aattgcttcacgtagttgtattc

SEQ ID NO: 1163 - RNA, 23 nt, synthetic construct
  source 1..23: mol_type = other RNA
  modified_base 1: mod_base = OTHER; note = 2'-O-methyladenosine-3'-phosphorothioate
  modified_base 2: mod_base = OTHER; note = 2'-deoxy-2'-fluoroadenosine-3'-phosphorothioate
  modified_base 3: mod_base = OTHER; note = 2'-O-methyladenosine-3'-phosphate
  modified_base 4: mod_base = OTHER; note = 2'-O-methyluridine-3'-phosphate
  modified_base 5: mod_base = OTHER; note = 2'-O-methylguanosine-3'-phosphate
  modified_base 6: mod_base = OTHER; note = 2'-deoxy-2'-fluorocytidine-3'-phosphate
  modified_base 7: mod_base = OTHER; note = 2'-O-methylcytidine-3'-phosphate
  modified_base 8: mod_base = OTHER; note = 2'-deoxy-2'-fluorouridine-3'-phosphate
  modified_base 9: mod_base = OTHER; note = 2'-deoxy-2'-fluorocytidine-3'-phosphate
  modified_base 10: mod_base = OTHER; note = 2'-O-methylcytidine-3'-phosphate
  modified_base 11: mod_base = OTHER; note = 2'-O-methyladenosine-3'-phosphate
  modified_base 12: mod_base = OTHER; note = 2'-O-methyluridine-3'-phosphate
  modified_base 13: mod_base = OTHER; note = 2'-O-methyluridine-3'-phosphate
  modified_base 14: mod_base = OTHER; note = 2'-deoxy-2'-fluoroguanosine-3'-phosphate
  modified_base 15: mod_base = OTHER; note = 2'-O-methylcytidine-3'-phosphate
  modified_base 16: mod_base = OTHER; note = 2'-deoxy-2'-fluorouridine-3'-phosphate
  modified_base 17: mod_base = OTHER; note = 2'-O-methyluridine-3'-phosphate
  modified_base 18: mod_base = OTHER; note = 2'-O-methylcytidine-3'-phosphate
  modified_base 19: mod_base = OTHER; note = 2'-O-methyladenosine-3'-phosphate
  modified_base 20: mod_base = OTHER; note = 2'-O-methylcytidine-3'-phosphate
  modified_base 21: mod_base = OTHER; note = 2'-O-methylguanosine-3'-phosphorothioate
  modified_base 22: mod_base = OTHER; note = 2'-O-methyluridine-3'-phosphorothioate
  modified_base 23: mod_base = OTHER; note = 2'-O-methyladenosine
aaatgcctccattgcttcacgta

SEQ ID NO: 1164 - RNA, 23 nt, synthetic construct
  source 1..23: mol_type = other RNA
  modified_base 1: mod_base = OTHER; note = 2'-O-methyladenosine-3'-phosphorothioate
  modified_base 2: mod_base = OTHER; note = 2'-deoxy-2'-fluoroadenosine-3'-phosphorothioate
  modified_base 3: mod_base = OTHER; note = 2'-O-methyladenosine-3'-phosphate
  modified_base 4: mod_base = OTHER; note = 2'-O-methylguanosine-3'-phosphate
  modified_base 5: mod_base = OTHER; note = 2'-O-methylcytidine-3'-phosphate
  modified_base 6: mod_base = OTHER; note = 2'-deoxy-2'-fluorouridine-3'-phosphate
  modified_base 7: mod_base = OTHER; note = 2'-O-methylguanosine-3'-phosphate
  modified_base 8: mod_base = OTHER; note = 2'-deoxy-2'-fluorouridine-3'-phosphate
  modified_base 9: mod_base = OTHER; note = 2'-deoxy-2'-fluoroguanosine-3'-phosphate
  modified_base 10: mod_base = OTHER; note = 2'-O-methyluridine-3'-phosphate
  modified_base 11: mod_base = OTHER; note = 2'-O-methyladenosine-3'-phosphate
  modified_base 12: mod_base = OTHER; note = 2'-O-methylguanosine-3'-phosphate
  modified_base 13: mod_base = OTHER; note = 2'-O-methylguanosine-3'-phosphate
  modified_base 14: mod_base = OTHER; note = 2'-deoxy-2'-fluoroadenosine-3'-phosphate
  modified_base 15: mod_base = OTHER; note = 2'-O-methyladenosine-3'-phosphate
  modified_base 16: mod_base = OTHER; note = 2'-deoxy-2'-fluorouridine-3'-phosphate
  modified_base 17: mod_base = OTHER; note = 2'-O-methylguanosine-3'-phosphate
  modified_base 18: mod_base = OTHER; note = 2'-O-methylcytidine-3'-phosphate
  modified_base 19: mod_base = OTHER; note = 2'-O-methylcytidine-3'-phosphate
  modified_base 20: mod_base = OTHER; note = 2'-O-methyluridine-3'-phosphate
  modified_base 21: mod_base = OTHER; note = 2'-O-methylcytidine-3'-phosphorothioate
  modified_base 22: mod_base = OTHER; note = 2'-O-methylcytidine-3'-phosphorothioate
  modified_base 23: mod_base = OTHER; note = 2'-O-methyladenosine
aaagctgtgtaggaatgcctcca

SEQ ID NO: 1165 - RNA, 23 nt, synthetic construct
  source 1..23: mol_type = other RNA
  modified_base 1: mod_base = OTHER; note = 2'-O-methyladenosine-3'-phosphorothioate
  modified_base 2: mod_base = OTHER; note = 2'-deoxy-2'-fluorocytidine-3'-phosphorothioate
  modified_base 3: mod_base = OTHER; note = 2'-O-methyladenosine-3'-phosphate
  modified_base 4: mod_base = OTHER; note = 2'-O-methyluridine-3'-phosphate
  modified_base 5: mod_base = OTHER; note = 2'-O-methyladenosine-3'-phosphate
  modified_base 6: mod_base = OTHER; note = 2'-deoxy-2'-fluorouridine-3'-phosphate
  modified_base 7: mod_base = OTHER; note = 2'-O-methylguanosine-3'-phosphate
  modified_base 8: mod_base = OTHER; note = 2'-deoxy-2'-fluoroadenosine-3'-phosphate
  modified_base 9: mod_base = OTHER; note = 2'-deoxy-2'-fluoroadenosine-3'-phosphate
  modified_base 10: mod_base = OTHER; note = 2'-O-methylguanosine-3'-phosphate
  modified_base 11: mod_base = OTHER; note = 2'-O-methylcytidine-3'-phosphate
  modified_base 12: mod_base = OTHER; note = 2'-O-methyluridine-3'-phosphate
  modified_base 13: mod_base = OTHER; note = 2'-O-methylguanosine-3'-phosphate
  modified_base 14: mod_base = OTHER; note = 2'-deoxy-2'-fluorouridine-3'-phosphate
  modified_base 15: mod_base = OTHER; note = 2'-O-methylguanosine-3'-phosphate
  modified_base 16: mod_base = OTHER; note = 2'-deoxy-2'-fluorouridine-3'-phosphate
  modified_base 17: mod_base = OTHER; note = 2'-O-methyladenosine-3'-phosphate
  modified_base 18: mod_base = OTHER; note = 2'-O-methylguanosine-3'-phosphate
  modified_base 19: mod_base = OTHER; note = 2'-O-methylguanosine-3'-phosphate
  modified_base 20: mod_base = OTHER; note = 2'-O-methyladenosine-3'-phosphate
  modified_base 21: mod_base = OTHER; note = 2'-O-methyladenosine-3'-phosphorothioate
  modified_base 22: mod_base = OTHER; note = 2'-O-methyluridine-3'-phosphorothioate
  modified_base 23: mod_base = OTHER; note = 2'-O-methylguanosine
acatatgaagctgtgtaggaatg

SEQ ID NO: 1166 - RNA, 23 nt, synthetic construct
  source 1..23: mol_type = other RNA
  modified_base 1: mod_base = OTHER; note = 2'-O-methyladenosine-3'-phosphorothioate
  modified_base 2: mod_base = OTHER; note = 2'-deoxy-2'-fluoroadenosine-3'-phosphorothioate
  modified_base 3: mod_base = OTHER; note = 2'-O-methyladenosine-3'-phosphate
  modified_base 4: mod_base = OTHER; note = 2'-O-methyladenosine-3'-phosphate
  modified_base 5: mod_base = OTHER; note = 2'-O-methyluridine-3'-phosphate
  modified_base 6: mod_base = OTHER; note = 2'-deoxy-2'-fluoroguanosine-3'-phosphate
  modified_base 7: mod_base = OTHER; note = 2'-O-methyluridine-3'-phosphate
  modified_base 8: mod_base = OTHER; note = 2'-deoxy-2'-fluorocytidine-3'-phosphate
  modified_base 9: mod_base = OTHER; note = 2'-deoxy-2'-fluoroadenosine-3'-phosphate
  modified_base 10: mod_base = OTHER; note = 2'-O-methyluridine-3'-phosphate
  modified_base 11: mod_base = OTHER; note = 2'-O-methyladenosine-3'-phosphate
  modified_base 12: mod_base = OTHER; note = 2'-O-methyluridine-3'-phosphate
  modified_base 13: mod_base = OTHER; note = 2'-O-methylguanosine-3'-phosphate
  modified_base 14: mod_base = OTHER; note = 2'-deoxy-2'-fluoroadenosine-3'-phosphate
  modified_base 15: mod_base = OTHER; note = 2'-O-methyladenosine-3'-phosphate
  modified_base 16: mod_base = OTHER; note = 2'-deoxy-2'-fluoroguanosine-3'-phosphate
  modified_base 17: mod_base = OTHER; note = 2'-O-methylcytidine-3'-phosphate
  modified_base 18: mod_base = OTHER; note = 2'-O-methyluridine-3'-phosphate
  modified_base 19: mod_base = OTHER; note = 2'-O-methylguanosine-3'-phosphate
  modified_base 20: mod_base = OTHER; note = 2'-O-methyluridine-3'-phosphate
  modified_base 21: mod_base = OTHER; note = 2'-O-methylguanosine-3'-phosphorothioate
  modified_base 22: mod_base = OTHER; note = 2'-O-methyluridine-3'-phosphorothioate
  modified_base 23: mod_base = OTHER; note = 2'-O-methyladenosine
aaaatgtcatatgaagctgtgta

SEQ ID NO: 1167 - RNA, 23 nt, synthetic construct
  source 1..23: mol_type = other RNA
  modified_base 1: mod_base = OTHER; note = 2'-O-methyladenosine-3'-phosphorothioate
  modified_base 2: mod_base = OTHER; note = 2'-deoxy-2'-fluoroadenosine-3'-phosphorothioate
  modified_base 3: mod_base = OTHER; note = 2'-O-methyladenosine-3'-phosphate
  modified_base 4: mod_base = OTHER; note = 2'-O-methyluridine-3'-phosphate
  modified_base 5: mod_base = OTHER; note = 2'-O-methylcytidine-3'-phosphate
  modified_base 6: mod_base = OTHER; note = 2'-deoxy-2'-fluoroadenosine-3'-phosphate
  modified_base 7: mod_base = OTHER; note = 2'-O-methyluridine-3'-phosphate
  modified_base 8: mod_base = OTHER; note = 2'-deoxy-2'-fluoroadenosine-3'-phosphate
  modified_base 9: mod_base = OTHER; note = 2'-deoxy-2'-fluoroadenosine-3'-phosphate
  modified_base 10: mod_base = OTHER; note = 2'-O-methyladenosine-3'-phosphate
  modified_base 11: mod_base = OTHER; note = 2'-O-methyluridine-3'-phosphate
  modified_base 12: mod_base = OTHER; note = 2'-O-methylguanosine-3'-phosphate
  modified_base 13: mod_base = OTHER; note = 2'-O-methyluridine-3'-phosphate
  modified_base 14: mod_base = OTHER; note = 2'-deoxy-2'-fluorocytidine-3'-phosphate
  modified_base 15: mod_base = OTHER; note = 2'-O-methyladenosine-3'-phosphate
  modified_base 16: mod_base = OTHER; note = 2'-deoxy-2'-fluorouridine-3'-phosphate
  modified_base 17: mod_base = OTHER; note = 2'-O-methyladenosine-3'-phosphate
  modified_base 18: mod_base = OTHER; note = 2'-O-methyluridine-3'-phosphate
  modified_base 19: mod_base = OTHER; note = 2'-O-methylguanosine-3'-phosphate
  modified_base 20: mod_base = OTHER; note = 2'-O-methyladenosine-3'-phosphate
  modified_base 21: mod_base = OTHER; note = 2'-O-methyladenosine-3'-phosphorothioate
  modified_base 22: mod_base = OTHER; note = 2'-O-methylguanosine-3'-phosphorothioate
  modified_base 23: mod_base = OTHER; note = 2'-O-methylcytidine
aaatcataaatgtcatatgaagc

SEQ ID NO: 1168 - RNA, 23 nt, synthetic construct
  source 1..23: mol_type = other RNA
  modified_base 1: mod_base = OTHER; note = 2'-O-methyladenosine-3'-phosphorothioate
  modified_base 2: mod_base = OTHER; note = 2'-deoxy-2'-fluoroguanosine-3'-phosphorothioate
  modified_base 3: mod_base = OTHER; note = 2'-O-methylcytidine-3'-phosphate
  modified_base 4: mod_base = OTHER; note = 2'-O-methyluridine-3'-phosphate
  modified_base 5: mod_base = OTHER; note = 2'-O-methylguanosine-3'-phosphate
  modified_base 6: mod_base = OTHER; note = 2'-deoxy-2'-fluorocytidine-3'-phosphate
  modified_base 7: mod_base = OTHER; note = 2'-O-methylcytidine-3'-phosphate
  modified_base 8: mod_base = OTHER; note = 2'-deoxy-2'-fluorouridine-3'-phosphate
  modified_base 9: mod_base = OTHER; note = 2'-deoxy-2'-fluorouridine-3'-phosphate
  modified_base 10: mod_base = OTHER; note = 2'-O-methyluridine-3'-phosphate
  modified_base 11: mod_base = OTHER; note = 2'-O-methyluridine-3'-phosphate
  modified_base 12: mod_base = OTHER; note = 2'-O-methyladenosine-3'-phosphate
  modified_base 13: mod_base = OTHER; note = 2'-O-methyluridine-3'-phosphate
  modified_base 14: mod_base = OTHER; note = 2'-deoxy-2'-fluorouridine-3'-phosphate
  modified_base 15: mod_base = OTHER; note = 2'-O-methyluridine-3'-phosphate
  modified_base 16: mod_base = OTHER; note = 2'-deoxy-2'-fluoroadenosine-3'-phosphate
  modified_base 17: mod_base = OTHER; note = 2'-O-methyladenosine-3'-phosphate
  modified_base 18: mod_base = OTHER; note = 2'-O-methyladenosine-3'-phosphate
  modified_base 19: mod_base = OTHER; note = 2'-O-methyluridine-3'-phosphate
  modified_base 20: mod_base = OTHER; note = 2'-O-methylcytidine-3'-phosphate
  modified_base 21: mod_base = OTHER; note = 2'-O-methyladenosine-3'-phosphorothioate
  modified_base 22: mod_base = OTHER; note = 2'-O-methyluridine-3'-phosphorothioate
  modified_base 23: mod_base = OTHER; note = 2'-O-methyladenosine
agctgccttttatttaaatcata

SEQ ID NO: 1169 - RNA, 23 nt, synthetic construct
  source 1..23: mol_type = other RNA
  modified_base 1: mod_base = OTHER; note = 2'-O-methyladenosine-3'-phosphorothioate
  modified_base 2: mod_base = OTHER; note = 2'-deoxy-2'-fluorouridine-3'-phosphorothioate
  modified_base 3: mod_base = OTHER; note = 2'-O-methyladenosine-3'-phosphate
  modified_base 4: mod_base = OTHER; note = 2'-O-methyladenosine-3'-phosphate
  modified_base 5: mod_base = OTHER; note = 2'-O-methyluridine-3'-phosphate
  modified_base 6: mod_base = OTHER; note = 2'-deoxy-2'-fluorocytidine-3'-phosphate
  modified_base 7: mod_base = OTHER; note = 2'-O-methyladenosine-3'-phosphate
  modified_base 8: mod_base = OTHER; note = 2'-deoxy-2'-fluoroguanosine-3'-phosphate
  modified_base 9: mod_base = OTHER; note = 2'-deoxy-2'-fluorocytidine-3'-phosphate
  modified_base 10: mod_base = OTHER; note = 2'-O-methyluridine-3'-phosphate
  modified_base 11: mod_base = OTHER; note = 2'-O-methylguanosine-3'-phosphate
  modified_base 12: mod_base = OTHER; note = 2'-O-methylcytidine-3'-phosphate
  modified_base 13: mod_base = OTHER; note = 2'-O-methylcytidine-3'-phosphate
  modified_base 14: mod_base = OTHER; note = 2'-deoxy-2'-fluorouridine-3'-phosphate
  modified_base 15: mod_base = OTHER; note = 2'-O-methyluridine-3'-phosphate
  modified_base 16: mod_base = OTHER; note = 2'-deoxy-2'-fluorouridine-3'-phosphate
  modified_base 17: mod_base = OTHER; note = 2'-O-methyluridine-3'-phosphate
  modified_base 18: mod_base = OTHER; note = 2'-O-methyladenosine-3'-phosphate
  modified_base 19: mod_base = OTHER; note = 2'-O-methyluridine-3'-phosphate
  modified_base 20: mod_base = OTHER; note = 2'-O-methyluridine-3'-phosphate
  modified_base 21: mod_base = OTHER; note = 2'-O-methyluridine-3'-phosphorothioate
  modified_base 22: mod_base = OTHER; note = 2'-O-methyladenosine-3'-phosphorothioate
  modified_base 23: mod_base = OTHER; note = 2'-O-methyladenosine
ataatcagctgccttttatttaa

SEQ ID NO: 1170 - RNA, 23 nt, synthetic construct
  source 1..23: mol_type = other RNA
  modified_base 1: mod_base = OTHER; note = 2'-O-methyladenosine-3'-phosphorothioate
  modified_base 2: mod_base = OTHER; note = 2'-deoxy-2'-fluorouridine-3'-phosphorothioate
  modified_base 3: mod_base = OTHER; note = 2'-O-methylcytidine-3'-phosphate
  modified_base 4: mod_base = OTHER; note = 2'-O-methyluridine-3'-phosphate
  modified_base 5: mod_base = OTHER; note = 2'-O-methyluridine-3'-phosphate
  modified_base 6: mod_base = OTHER; note = 2'-deoxy-2'-fluorocytidine-3'-phosphate
  modified_base 7: mod_base = OTHER; note = 2'-O-methyluridine-3'-phosphate
  modified_base 8: mod_base = OTHER; note = 2'-deoxy-2'-fluoroguanosine-3'-phosphate
  modified_base 9: mod_base = OTHER; note = 2'-deoxy-2'-fluorouridine-3'-phosphate
  modified_base 10: mod_base = OTHER; note = 2'-O-methyladenosine-3'-phosphate
  modified_base 11: mod_base = OTHER; note = 2'-O-methyladenosine-3'-phosphate
  modified_base 12: mod_base = OTHER; note = 2'-O-methyluridine-3'-phosphate
  modified_base 13: mod_base = OTHER; note = 2'-O-methylcytidine-3'-phosphate
  modified_base 14: mod_base = OTHER; note = 2'-deoxy-2'-fluoroadenosine-3'-phosphate
  modified_base 15: mod_base = OTHER; note = 2'-O-methylguanosine-3'-phosphate
  modified_base 16: mod_base = OTHER; note = 2'-deoxy-2'-fluorocytidine-3'-phosphate
  modified_base 17: mod_base = OTHER; note = 2'-O-methyluridine-3'-phosphate
  modified_base 18: mod_base = OTHER; note = 2'-O-methylguanosine-3'-phosphate
  modified_base 19: mod_base = OTHER; note = 2'-O-methylcytidine-3'-phosphate
  modified_base 20: mod_base = OTHER; note = 2'-O-methylcytidine-3'-phosphate
  modified_base 21: mod_base = OTHER; note = 2'-O-methyluridine-3'-phosphorothioate
  modified_base 22: mod_base = OTHER; note = 2'-O-methyluridine-3'-phosphorothioate
  modified_base 23: mod_base = OTHER; note = 2'-O-methyluridine
atcttctgtaatcagctgccttt

SEQ ID NO: 1171 - RNA, 23 nt, synthetic construct
  source 1..23: mol_type = other RNA
  modified_base 1: mod_base = OTHER; note = 2'-O-methyladenosine-3'-phosphorothioate
  modified_base 2: mod_base = OTHER; note = 2'-deoxy-2'-fluoroadenosine-3'-phosphorothioate
  modified_base 3: mod_base = OTHER; note = 2'-O-methyladenosine-3'-phosphate
  modified_base 4: mod_base = OTHER; note = 2'-O-methyluridine-3'-phosphate
  modified_base 5: mod_base = OTHER; note = 2'-O-methylcytidine-3'-phosphate
  modified_base 6: mod_base = OTHER; note = 2'-deoxy-2'-fluorocytidine-3'-phosphate
  modified_base 7: mod_base = OTHER; note = 2'-O-methyluridine-3'-phosphate
  modified_base 8: mod_base = OTHER; note = 2'-deoxy-2'-fluorocytidine-3'-phosphate
  modified_base 9: mod_base = OTHER; note = 2'-deoxy-2'-fluorouridine-3'-phosphate
  modified_base 10: mod_base = OTHER; note = 2'-O-methylcytidine-3'-phosphate
  modified_base 11: mod_base = OTHER; note = 2'-O-methyluridine-3'-phosphate
  modified_base 12: mod_base = OTHER; note = 2'-O-methyluridine-3'-phosphate
  modified_base 13: mod_base = OTHER; note = 2'-O-methylcytidine-3'-phosphate
  modified_base 14: mod_base = OTHER; note = 2'-deoxy-2'-fluorouridine-3'-phosphate
  modified_base 15: mod_base = OTHER; note = 2'-O-methylguanosine-3'-phosphate
  modified_base 16: mod_base = OTHER; note = 2'-deoxy-2'-fluorouridine-3'-phosphate
  modified_base 17: mod_base = OTHER; note = 2'-O-methyladenosine-3'-phosphate
  modified_base 18: mod_base = OTHER; note = 2'-O-methyladenosine-3'-phosphate
  modified_base 19: mod_base = OTHER; note = 2'-O-methyluridine-3'-phosphate
  modified_base 20: mod_base = OTHER; note = 2'-O-methylcytidine-3'-phosphate
  modified_base 21: mod_base = OTHER; note = 2'-O-methyladenosine-3'-phosphorothioate
  modified_base 22: mod_base = OTHER; note = 2'-O-methylguanosine-3'-phosphorothioate
  modified_base 23: mod_base = OTHER; note = 2'-O-methylcytidine
aaatcctctcttctgtaatcagc

SEQ ID NO: 1172 - RNA, 23 nt, synthetic construct
  source 1..23: mol_type = other RNA
  modified_base 1: mod_base = OTHER; note = 2'-O-methyladenosine-3'-phosphorothioate
  modified_base 2: mod_base = OTHER; note = 2'-deoxy-2'-fluoroguanosine-3'-phosphorothioate
  modified_base 3: mod_base = OTHER; note = 2'-O-methyluridine-3'-phosphate
  modified_base 4: mod_base = OTHER; note = 2'-O-methyluridine-3'-phosphate
  modified_base 5: mod_base = OTHER; note = 2'-O-methylguanosine-3'-phosphate
  modified_base 6: mod_base = OTHER; note = 2'-deoxy-2'-fluorouridine-3'-phosphate
  modified_base 7: mod_base = OTHER; note = 2'-O-methyluridine-3'-phosphate
  modified_base 8: mod_base = OTHER; note = 2'-deoxy-2'-fluorouridine-3'-phosphate
  modified_base 9: mod_base = OTHER; note = 2'-deoxy-2'-fluoroguanosine-3'-phosphate
  modified_base 10: mod_base = OTHER; note = 2'-O-methylguanosine-3'-phosphate
  modified_base 11: mod_base = OTHER; note = 2'-O-methyladenosine-3'-phosphate
  modified_base 12: mod_base = OTHER; note = 2'-O-methyladenosine-3'-phosphate
  modified_base 13: mod_base = OTHER; note = 2'-O-methyluridine-3'-phosphate
  modified_base 14: mod_base = OTHER; note = 2'-deoxy-2'-fluorocytidine-3'-phosphate
  modified_base 15: mod_base = OTHER; note = 2'-O-methylcytidine-3'-phosphate
  modified_base 16: mod_base = OTHER; note = 2'-deoxy-2'-fluorouridine-3'-phosphate
  modified_base 17: mod_base = OTHER; note = 2'-O-methylcytidine-3'-phosphate
  modified_base 18: mod_base = OTHER; note = 2'-O-methyluridine-3'-phosphate
  modified_base 19: mod_base = OTHER; note = 2'-O-methylcytidine-3'-phosphate
  modified_base 20: mod_base = OTHER; note = 2'-O-methyluridine-3'-phosphate
  modified_base 21: mod_base = OTHER; note = 2'-O-methyluridine-3'-phosphorothioate
  modified_base 22: mod_base = OTHER; note = 2'-O-methylcytidine-3'-phosphorothioate
  modified_base 23: mod_base = OTHER; note = 2'-O-methyluridine
agttgtttggaatcctctcttct

SEQ ID NO: 1173 - RNA, 23 nt, synthetic construct
  source 1..23: mol_type = other RNA
  modified_base 1: mod_base = OTHER; note = 2'-O-methyladenosine-3'-phosphorothioate
  modified_base 2: mod_base = OTHER; note = 2'-deoxy-2'-fluoroadenosine-3'-phosphorothioate
  modified_base 3: mod_base = OTHER; note = 2'-O-methylcytidine-3'-phosphate
  modified_base 4: mod_base = OTHER; note = 2'-O-methyluridine-3'-phosphate
  modified_base 5: mod_base = OTHER; note = 2'-O-methylguanosine-3'-phosphate
  modified_base 6: mod_base = OTHER; note = 2'-deoxy-2'-fluorouridine-3'-phosphate
  modified_base 7: mod_base = OTHER; note = 2'-O-methylguanosine-3'-phosphate
  modified_base 8: mod_base = OTHER; note = 2'-deoxy-2'-fluorouridine-3'-phosphate
  modified_base 9: mod_base = OTHER; note = 2'-deoxy-2'-fluoroguanosine-3'-phosphate
  modified_base 10: mod_base = OTHER; note = 2'-O-methyluridine-3'-phosphate
  modified_base 11: mod_base = OTHER; note = 2'-O-methyluridine-3'-phosphate
  modified_base 12: mod_base = OTHER; note = 2'-O-methylguanosine-3'-phosphate
  modified_base 13: mod_base = OTHER; note = 2'-O-methyluridine-3'-phosphate
  modified_base 14: mod_base = OTHER; note = 2'-deoxy-2'-fluorouridine-3'-phosphate
  modified_base 15: mod_base = OTHER; note = 2'-O-methyluridine-3'-phosphate
  modified_base 16: mod_base = OTHER; note = 2'-deoxy-2'-fluoroguanosine-3'-phosphate
  modified_base 17: mod_base = OTHER; note = 2'-O-methylguanosine-3'-phosphate
  modified_base 18: mod_base = OTHER; note = 2'-O-methyladenosine-3'-phosphate
  modified_base 19: mod_base = OTHER; note = 2'-O-methyladenosine-3'-phosphate
  modified_base 20: mod_base = OTHER; note = 2'-O-methyluridine-3'-phosphate
  modified_base 21: mod_base = OTHER; note = 2'-O-methylcytidine-3'-phosphorothioate
  modified_base 22: mod_base = OTHER; note = 2'-O-methylcytidine-3'-phosphorothioate
  modified_base 23: mod_base = OTHER; note = 2'-O-methyluridine
aactgtgtgttgtttggaatcct

SEQ ID NO: 1174 - RNA, 23 nt, synthetic construct
  source 1..23: mol_type = other RNA
  modified_base 1: mod_base = OTHER; note = 2'-O-methyladenosine-3'-phosphorothioate
  modified_base 2: mod_base = OTHER; note = 2'-deoxy-2'-fluoroadenosine-3'-phosphorothioate
  modified_base 3: mod_base = OTHER; note = 2'-O-methyluridine-3'-phosphate
  modified_base 4: mod_base = OTHER; note = 2'-O-methylguanosine-3'-phosphate
  modified_base 5: mod_base = OTHER; note = 2'-O-methyluridine-3'-phosphate
  modified_base 6: mod_base = OTHER; note = 2'-deoxy-2'-fluoroguanosine-3'-phosphate
  modified_base 7: mod_base = OTHER; note = 2'-O-methyladenosine-3'-phosphate
  modified_base 8: mod_base = OTHER; note = 2'-deoxy-2'-fluorocytidine-3'-phosphate
  modified_base 9: mod_base = OTHER; note = 2'-deoxy-2'-fluorocytidine-3'-phosphate
  modified_base 10: mod_base = OTHER; note = 2'-O-methylcytidine-3'-phosphate
  modified_base 11: mod_base = OTHER; note = 2'-O-methyladenosine-3'-phosphate
  modified_base 12: mod_base = OTHER; note = 2'-O-methylcytidine-3'-phosphate
  modified_base 13: mod_base = OTHER; note = 2'-O-methyluridine-3'-phosphate
  modified_base 14: mod_base = OTHER; note = 2'-deoxy-2'-fluoroguanosine-3'-phosphate
  modified_base 15: mod_base = OTHER; note = 2'-O-methyluridine-3'-phosphate
  modified_base 16: mod_base = OTHER; note = 2'-deoxy-2'-fluoroguanosine-3'-phosphate
  modified_base 17: mod_base = OTHER; note = 2'-O-methyluridine-3'-phosphate
  modified_base 18: mod_base = OTHER; note = 2'-O-methylguanosine-3'-phosphate
  modified_base 19: mod_base = OTHER; note = 2'-O-methyluridine-3'-phosphate
  modified_base 20: mod_base = OTHER; note = 2'-O-methyluridine-3'-phosphate
  modified_base 21: mod_base = OTHER; note = 2'-O-methylguanosine-3'-phosphorothioate
  modified_base 22: mod_base = OTHER; note = 2'-O-methyluridine-3'-phosphorothioate
  modified_base 23: mod_base = OTHER; note = 2'-O-methyluridine
aatgtgacccactgtgtgttgtt

SEQ ID NO: 1175 - RNA, 23 nt, synthetic construct
  source 1..23: mol_type = other RNA
  modified_base 1: mod_base = OTHER; note = 2'-O-methyladenosine-3'-phosphorothioate
  modified_base 2: mod_base = OTHER; note = 2'-deoxy-2'-fluoroadenosine-3'-phosphorothioate
  modified_base 3: mod_base = OTHER; note = 2'-O-methylcytidine-3'-phosphate
  modified_base 4: mod_base = OTHER; note = 2'-O-methyluridine-3'-phosphate
  modified_base 5: mod_base = OTHER; note = 2'-O-methylguanosine-3'-phosphate
  modified_base 6: mod_base = OTHER; note = 2'-deoxy-2'-fluoroguanosine-3'-phosphate
  modified_base 7: mod_base = OTHER; note = 2'-O-methyluridine-3'-phosphate
  modified_base 8: mod_base = OTHER; note = 2'-deoxy-2'-fluoroguanosine-3'-phosphate
  modified_base 9: mod_base = OTHER; note = 2'-deoxy-2'-fluoroadenosine-3'-phosphate
  modified_base 10: mod_base = OTHER; note = 2'-O-methylcytidine-3'-phosphate
  modified_base 11: mod_base = OTHER; note = 2'-O-methylcytidine-3'-phosphate
  modified_base 12: mod_base = OTHER; note = 2'-O-methyladenosine-3'-phosphate
  modified_base 13: mod_base = OTHER; note = 2'-O-methyluridine-3'-phosphate
  modified_base 14: mod_base = OTHER; note = 2'-deoxy-2'-fluoroguanosine-3'-phosphate
  modified_base 15: mod_base = OTHER; note = 2'-O-methyluridine-3'-phosphate
  modified_base 16: mod_base = OTHER; note = 2'-deoxy-2'-fluoroguanosine-3'-phosphate
  modified_base 17: mod_base = OTHER; note = 2'-O-methyladenosine-3'-phosphate
  modified_base 18: mod_base = OTHER; note = 2'-O-methylcytidine-3'-phosphate
  modified_base 19: mod_base = OTHER; note = 2'-O-methylcytidine-3'-phosphate
  modified_base 20: mod_base = OTHER; note = 2'-O-methylcytidine-3'-phosphate
  modified_base 21: mod_base = OTHER; note = 2'-O-methyladenosine-3'-phosphorothioate
  modified_base 22: mod_base = OTHER; note = 2'-O-methylcytidine-3'-phosphorothioate
  modified_base 23: mod_base = OTHER; note = 2'-O-methyluridine
aactggtgaccatgtgacccact

SEQ ID NO: 1176 - RNA, 23 nt, synthetic construct
  source 1..23: mol_type = other RNA
  modified_base 1: mod_base = OTHER; note = 2'-O-methyladenosine-3'-phosphorothioate
  modified_base 2: mod_base = OTHER; note = 2'-deoxy-2'-fluorouridine-3'-phosphorothioate
  modified_base 3: mod_base = OTHER; note = 2'-O-methyladenosine-3'-phosphate
  modified_base 4: mod_base = OTHER; note = 2'-O-methyluridine-3'-phosphate
  modified_base 5: mod_base = OTHER; note = 2'-O-methylguanosine-3'-phosphate
  modified_base 6: mod_base = OTHER; note = 2'-deoxy-2'-fluoroadenosine-3'-phosphate
  modified_base 7: mod_base = OTHER; note = 2'-O-methylcytidine-3'-phosphate
  modified_base 8: mod_base = OTHER; note = 2'-deoxy-2'-fluorocytidine-3'-phosphate
  modified_base 9: mod_base = OTHER; note = 2'-deoxy-2'-fluorocytidine-3'-phosphate
  modified_base 10: mod_base = OTHER; note = 2'-O-methyladenosine-3'-phosphate
  modified_base 11: mod_base = OTHER; note = 2'-O-methylcytidine-3'-phosphate
  modified_base 12: mod_base = OTHER; note = 2'-O-methyluridine-3'-phosphate
  modified_base 13: mod_base = OTHER; note = 2'-O-methylguanosine-3'-phosphate
  modified_base 14: mod_base = OTHER; note = 2'-deoxy-2'-fluoroguanosine-3'-phosphate
  modified_base 15: mod_base = OTHER; note = 2'-O-methyluridine-3'-phosphate
  modified_base 16: mod_base = OTHER; note = 2'-deoxy-2'-fluoroguanosine-3'-phosphate
  modified_base 17: mod_base = OTHER; note = 2'-O-methyladenosine-3'-phosphate
  modified_base 18: mod_base = OTHER; note = 2'-O-methylcytidine-3'-phosphate
  modified_base 19: mod_base = OTHER; note = 2'-O-methylcytidine-3'-phosphate
  modified_base 20: mod_base = OTHER; note = 2'-O-methyladenosine-3'-phosphate
  modified_base 21: mod_base = OTHER; note = 2'-O-methyluridine-3'-phosphorothioate
  modified_base 22: mod_base = OTHER; note = 2'-O-methylguanosine-3'-phosphorothioate
  modified_base 23: mod_base = OTHER; note = 2'-O-methyluridine
atatgacccactggtgaccatgt

SEQ ID NO: 1177 - RNA, 23 nt, synthetic construct
  source 1..23: mol_type = other RNA
  modified_base 1: mod_base = OTHER; note = 2'-O-methyladenosine-3'-phosphorothioate
  modified_base 2: mod_base = OTHER; note = 2'-deoxy-2'-fluoroadenosine-3'-phosphorothioate
  modified_base 3: mod_base = OTHER; note = 2'-O-methyluridine-3'-phosphate
  modified_base 4: mod_base = OTHER; note = 2'-O-methylguanosine-3'-phosphate
  modified_base 5: mod_base = OTHER; note = 2'-O-methylcytidine-3'-phosphate
  modified_base 6: mod_base = OTHER; note = 2'-deoxy-2'-fluorocytidine-3'-phosphate
  modified_base 7: mod_base = OTHER; note = 2'-O-methyladenosine-3'-phosphate
  modified_base 8: mod_base = OTHER; note = 2'-deoxy-2'-fluoroadenosine-3'-phosphate
  modified_base 9: mod_base = OTHER; note = 2'-deoxy-2'-fluorouridine-3'-phosphate
  modified_base 10: mod_base = OTHER; note = 2'-O-methyluridine-3'-phosphate
  modified_base 11: mod_base = OTHER; note = 2'-O-methyluridine-3'-phosphate
  modified_base 12: mod_base = OTHER; note = 2'-O-methyladenosine-3'-phosphate
  modified_base 13: mod_base = OTHER; note = 2'-O-methyluridine-3'-phosphate
  modified_base 14: mod_base = OTHER; note = 2'-deoxy-2'-fluoroguanosine-3'-phosphate
  modified_base 15: mod_base = OTHER; note = 2'-O-methyladenosine-3'-phosphate
  modified_base 16: mod_base = OTHER; note = 2'-deoxy-2'-fluorocytidine-3'-phosphate
  modified_base 17: mod_base = OTHER; note = 2'-O-methylcytidine-3'-phosphate
  modified_base 18: mod_base = OTHER; note = 2'-O-methylcytidine-3'-phosphate
  modified_base 19: mod_base = OTHER; note = 2'-O-methyladenosine-3'-phosphate
  modified_base 20: mod_base = OTHER; note = 2'-O-methylcytidine-3'-phosphate
  modified_base 21: mod_base = OTHER; note = 2'-O-methyluridine-3'-phosphorothioate
  modified_base 22: mod_base = OTHER; note = 2'-O-methylguanosine-3'-phosphorothioate
  modified_base 23: mod_base = OTHER; note = 2'-O-methylguanosine
aatgccaatttatgacccactgg

SEQ ID NO: 1178 - RNA, 23 nt, synthetic construct
  source 1..23: mol_type = other RNA
  modified_base 1: mod_base = OTHER; note = 2'-O-methyladenosine-3'-phosphorothioate
  modified_base 2: mod_base = OTHER; note = 2'-deoxy-2'-fluorocytidine-3'-phosphorothioate
  modified_base 3: mod_base = OTHER; note = 2'-O-methyladenosine-3'-phosphate
  modified_base 4: mod_base = OTHER; note = 2'-O-methyladenosine-3'-phosphate
  modified_base 5: mod_base = OTHER; note = 2'-O-methyladenosine-3'-phosphate
  modified_base 6: mod_base = OTHER; note = 2'-deoxy-2'-fluorocytidine-3'-phosphate
  modified_base 7: mod_base = OTHER; note = 2'-O-methyladenosine-3'-phosphate
  modified_base 8: mod_base = OTHER; note = 2'-deoxy-2'-fluorouridine-3'-phosphate
  modified_base 9: mod_base = OTHER; note = 2'-deoxy-2'-fluoroadenosine-3'-phosphate
  modified_base 10: mod_base = OTHER; note = 2'-O-methyluridine-3'-phosphate
  modified_base 11: mod_base = OTHER; note = 2'-O-methylguanosine-3'-phosphate
  modified_base 12: mod_base = OTHER; note = 2'-O-methylcytidine-3'-phosphate
  modified_base 13: mod_base = OTHER; note = 2'-O-methylcytidine-3'-phosphate
  modified_base 14: mod_base = OTHER; note = 2'-deoxy-2'-fluoroadenosine-3'-phosphate
  modified_base 15: mod_base = OTHER; note = 2'-O-methyladenosine-3'-phosphate
  modified_base 16: mod_base = OTHER; note = 2'-deoxy-2'-fluorouridine-3'-phosphate
  modified_base 17: mod_base = OTHER; note = 2'-O-methyluridine-3'-phosphate
  modified_base 18: mod_base = OTHER; note = 2'-O-methyluridine-3'-phosphate
  modified_base 19: mod_base = OTHER; note = 2'-O-methyladenosine-3'-phosphate
  modified_base 20: mod_base = OTHER; note = 2'-O-methyluridine-3'-phosphate
  modified_base 21: mod_base = OTHER; note = 2'-O-methylguanosine-3'-phosphorothioate
  modified_base 22: mod_base = OTHER; note = 2'-O-methyladenosine-3'-phosphorothioate
  modified_base 23: mod_base = OTHER; note = 2'-O-methylcytidine
acaaacatatgccaatttatgac

SEQ ID NO: 1179 - RNA, 23 nt, synthetic construct
  source 1..23: mol_type = other RNA
  modified_base 1: mod_base = OTHER; note = 2'-O-methyladenosine-3'-phosphorothioate
  modified_base 2: mod_base = OTHER; note = 2'-deoxy-2'-fluorocytidine-3'-phosphorothioate
  modified_base 3: mod_base = OTHER; note = 2'-O-methyladenosine-3'-phosphate
  modified_base 4: mod_base = OTHER; note = 2'-O-methyluridine-3'-phosphate
  modified_base 5: mod_base = OTHER; note = 2'-O-methyluridine-3'-phosphate
  modified_base 6: mod_base = OTHER; note = 2'-deoxy-2'-fluoroguanosine-3'-phosphate
  modified_base 7: mod_base = OTHER; note = 2'-O-methyluridine-3'-phosphate
  modified_base 8: mod_base = OTHER; note = 2'-deoxy-2'-fluorouridine-3'-phosphate
  modified_base 9: mod_base = OTHER; note = 2'-deoxy-2'-fluorocytidine-3'-phosphate
  modified_base 10: mod_base = OTHER; note = 2'-O-methylcytidine-3'-phosphate
  modified_base 11: mod_base = OTHER; note = 2'-O-methyladenosine-3'-phosphate
  modified_base 12: mod_base = OTHER; note = 2'-O-methyladenosine-3'-phosphate
  modified_base 13: mod_base = OTHER; note = 2'-O-methyladenosine-3'-phosphate
  modified_base 14: mod_base = OTHER; note = 2'-deoxy-2'-fluorocytidine-3'-phosphate
  modified_base 15: mod_base = OTHER; note = 2'-O-methyladenosine-3'-phosphate
  modified_base 16: mod_base = OTHER; note = 2'-deoxy-2'-fluorouridine-3'-phosphate
  modified_base 17: mod_base = OTHER; note = 2'-O-methyladenosine-3'-phosphate
  modified_base 18: mod_base = OTHER; note = 2'-O-methyluridine-3'-phosphate
  modified_base 19: mod_base = OTHER; note = 2'-O-methylguanosine-3'-phosphate
  modified_base 20: mod_base = OTHER; note = 2'-O-methylcytidine-3'-phosphate
  modified_base 21: mod_base = OTHER; note = 2'-O-methylcytidine-3'-phosphorothioate
  modified_base 22: mod_base = OTHER; note = 2'-O-methyladenosine-3'-phosphorothioate
  modified_base 23: mod_base = OTHER; note = 2'-O-methyladenosine
acattgttccaaacatatgccaa

SEQ ID NO: 1180 - RNA, 23 nt, synthetic construct
  source 1..23: mol_type = other RNA
  modified_base 1: mod_base = OTHER; note = 2'-O-methyladenosine-3'-phosphorothioate
  modified_base 2: mod_base = OTHER; note = 2'-deoxy-2'-fluoroadenosine-3'-phosphorothioate
  modified_base 3: mod_base = OTHER; note = 2'-O-methylcytidine-3'-phosphate
  modified_base 4: mod_base = OTHER; note = 2'-O-methyladenosine-3'-phosphate
  modified_base 5: mod_base = OTHER; note = 2'-O-methyluridine-3'-phosphate
  modified_base 6: mod_base = OTHER; note = 2'-deoxy-2'-fluoroadenosine-3'-phosphate
  modified_base 7: mod_base = OTHER; note = 2'-O-methyladenosine-3'-phosphate
  modified_base 8: mod_base = OTHER; note = 2'-deoxy-2'-fluoroadenosine-3'-phosphate
  modified_base 9: mod_base = OTHER; note = 2'-deoxy-2'-fluorouridine-3'-phosphate
  modified_base 10: mod_base = OTHER; note = 2'-O-methylguanosine-3'-phosphate
  modified_base 11: mod_base = OTHER; note = 2'-O-methyluridine-3'-phosphate
  modified_base 12: mod_base = OTHER; note = 2'-O-methylcytidine-3'-phosphate
  modified_base 13: mod_base = OTHER; note = 2'-O-methyladenosine-3'-phosphate
  modified_base 14: mod_base = OTHER; note = 2'-deoxy-2'-fluorouridine-3'-phosphate
  modified_base 15: mod_base = OTHER; note = 2'-O-methyluridine-3'-phosphate
  modified_base 16: mod_base = OTHER; note = 2'-deoxy-2'-fluoroguanosine-3'-phosphate
  modified_base 17: mod_base = OTHER; note = 2'-O-methyluridine-3'-phosphate
  modified_base 18: mod_base = OTHER; note = 2'-O-methyluridine-3'-phosphate
  modified_base 19: mod_base = OTHER; note = 2'-O-methylcytidine-3'-phosphate
  modified_base 20: mod_base = OTHER; note = 2'-O-methylcytidine-3'-phosphate
  modified_base 21: mod_base = OTHER; note = 2'-O-methyladenosine-3'-phosphorothioate
  modified_base 22: mod_base = OTHER; note = 2'-O-methyladenosine-3'-phosphorothioate
  modified_base 23: mod_base = OTHER; note = 2'-O-methyladenosine
aacataaatgtcattgttccaaa

SEQ ID NO: 1181 - RNA, 23 nt, synthetic construct
  source 1..23: mol_type = other RNA
  modified_base 1: mod_base = OTHER; note = 2'-O-methyladenosine-3'-phosphorothioate
  modified_base 2: mod_base = OTHER; note = 2'-deoxy-2'-fluoroadenosine-3'-phosphorothioate
  modified_base 3: mod_base = OTHER; note = 2'-O-methylcytidine-3'-phosphate
  modified_base 4: mod_base = OTHER; note = 2'-O-methyluridine-3'-phosphate
  modified_base 5: mod_base = OTHER; note = 2'-O-methyluridine-3'-phosphate
  modified_base 6: mod_base = OTHER; note = 2'-deoxy-2'-fluoroguanosine-3'-phosphate
  modified_base 7: mod_base = OTHER; note = 2'-O-methylguanosine-3'-phosphate
  modified_base 8: mod_base = OTHER; note = 2'-deoxy-2'-fluorouridine-3'-phosphate
  modified_base 9: mod_base = OTHER; note = 2'-deoxy-2'-fluoroadenosine-3'-phosphate
  modified_base 10: mod_base = OTHER; note = 2'-O-methyladenosine-3'-phosphate
  modified_base 11: mod_base = OTHER; note = 2'-O-methyladenosine-3'-phosphate
  modified_base 12: mod_base = OTHER; note = 2'-O-methyluridine-3'-phosphate
  modified_base 13: mod_base = OTHER; note = 2'-O-methyluridine-3'-phosphate
  modified_base 14: mod_base = OTHER; note = 2'-deoxy-2'-fluorouridine-3'-phosphate
  modified_base 15: mod_base = OTHER; note = 2'-O-methylguanosine-3'-phosphate
  modified_base 16: mod_base = OTHER; note = 2'-deoxy-2'-fluoroguanosine-3'-phosphate
  modified_base 17: mod_base = OTHER; note = 2'-O-methyluridine-3'-phosphate
  modified_base 18: mod_base = OTHER; note = 2'-O-methyluridine-3'-phosphate
  modified_base 19: mod_base = OTHER; note = 2'-O-methylcytidine-3'-phosphate
  modified_base 20: mod_base = OTHER; note = 2'-O-methyladenosine-3'-phosphate
  modified_base 21: mod_base = OTHER; note = 2'-O-methyladenosine-3'-phosphorothioate
  modified_base 22: mod_base = OTHER; note = 2'-O-methyluridine-3'-phosphorothioate
  modified_base 23: mod_base = OTHER; note = 2'-O-methyluridine
aacttggtaaatttggttcaatt

SEQ ID NO: 1182 - RNA, 23 nt, synthetic construct
  source 1..23: mol_type = other RNA
  modified_base 1: mod_base = OTHER; note = 2'-O-methyladenosine-3'-phosphorothioate
  modified_base 2: mod_base = OTHER; note = 2'-deoxy-2'-fluorouridine-3'-phosphorothioate
  modified_base 3: mod_base = OTHER; note = 2'-O-methylcytidine-3'-phosphate
  modified_base 4: mod_base = OTHER; note = 2'-O-methyluridine-3'-phosphate
  modified_base 5: mod_base = OTHER; note = 2'-O-methylguanosine-3'-phosphate
  modified_base 6: mod_base = OTHER; note = 2'-deoxy-2'-fluorouridine-3'-phosphate
  modified_base 7: mod_base = OTHER; note = 2'-O-methyladenosine-3'-phosphate
  modified_base 8: mod_base = OTHER; note = 2'-deoxy-2'-fluoroadenosine-3'-phosphate
  modified_base 9: mod_base = OTHER; note = 2'-deoxy-2'-fluorocytidine-3'-phosphate
  modified_base 10: mod_base = OTHER; note = 2'-O-methyluridine-3'-phosphate
  modified_base 11: mod_base = OTHER; note = 2'-O-methyluridine-3'-phosphate
  modified_base 12: mod_base = OTHER; note = 2'-O-methylguanosine-3'-phosphate
  modified_base 13: mod_base = OTHER; note = 2'-O-methylguanosine-3'-phosphate
  modified_base 14: mod_base = OTHER; note = 2'-deoxy-2'-fluorouridine-3'-phosphate
  modified_base 15: mod_base = OTHER; note = 2'-O-methyladenosine-3'-phosphate
  modified_base 16: mod_base = OTHER; note = 2'-deoxy-2'-fluoroadenosine-3'-phosphate
  modified_base 17: mod_base = OTHER; note = 2'-O-methyladenosine-3'-phosphate
  modified_base 18: mod_base = OTHER; note = 2'-O-methyluridine-3'-phosphate
  modified_base 19: mod_base = OTHER; note = 2'-O-methyluridine-3'-phosphate
  modified_base 20: mod_base = OTHER; note = 2'-O-methyluridine-3'-phosphate
  modified_base 21: mod_base = OTHER; note = 2'-O-methylguanosine-3'-phosphorothioate
  modified_base 22: mod_base = OTHER; note = 2'-O-methylguanosine-3'-phosphorothioate
  modified_base 23: mod_base = OTHER; note = 2'-O-methyluridine
atctgtaacttggtaaatttggt

SEQ ID NO: 1183 - RNA, 23 nt, synthetic construct
  source 1..23: mol_type = other RNA
  modified_base 1: mod_base = OTHER; note = 2'-O-methyladenosine-3'-phosphorothioate
  modified_base 2: mod_base = OTHER; note = 2'-deoxy-2'-fluoroadenosine-3'-phosphorothioate
  modified_base 3: mod_base = OTHER; note = 2'-O-methyluridine-3'-phosphate
  modified_base 4: mod_base = OTHER; note = 2'-O-methylguanosine-3'-phosphate
  modified_base 5: mod_base = OTHER; note = 2'-O-methyluridine-3'-phosphate
  modified_base 6: mod_base = OTHER; note = 2'-deoxy-2'-fluoroguanosine-3'-phosphate
  modified_base 7: mod_base = OTHER; note = 2'-O-methyladenosine-3'-phosphate
  modified_base 8: mod_base = OTHER; note = 2'-deoxy-2'-fluorouridine-3'-phosphate
  modified_base 9: mod_base = OTHER; note = 2'-deoxy-2'-fluorouridine-3'-phosphate
  modified_base 10: mod_base = OTHER; note = 2'-O-methylcytidine-3'-phosphate
  modified_base 11: mod_base = OTHER; note = 2'-O-methyluridine-3'-phosphate
  modified_base 12: mod_base = OTHER; note = 2'-O-methylguanosine-3'-phosphate
  modified_base 13: mod_base = OTHER; note = 2'-O-methyluridine-3'-phosphate
  modified_base 14: mod_base = OTHER; note = 2'-deoxy-2'-fluoroadenosine-3'-phosphate
  modified_base 15: mod_base = OTHER; note = 2'-O-methyladenosine-3'-phosphate
  modified_base 16: mod_base = OTHER; note = 2'-deoxy-2'-fluorocytidine-3'-phosphate
  modified_base 17: mod_base = OTHER; note = 2'-O-methyluridine-3'-phosphate
  modified_base 18: mod_base = OTHER; note = 2'-O-methyluridine-3'-phosphate
  modified_base 19: mod_base = OTHER; note = 2'-O-methylguanosine-3'-phosphate
  modified_base 20: mod_base = OTHER; note = 2'-O-methylguanosine-3'-phosphate
  modified_base 21: mod_base = OTHER; note = 2'-O-methyluridine-3'-phosphorothioate
  modified_base 22: mod_base = OTHER; note = 2'-O-methyladenosine-3'-phosphorothioate
  modified_base 23: mod_base = OTHER; note = 2'-O-methyladenosine
aatgtgattctgtaacttggtaa

SEQ ID NO: 1184 - RNA, 23 nt, synthetic construct
  source 1..23: mol_type = other RNA
  modified_base 1: mod_base = OTHER; note = 2'-O-methyladenosine-3'-phosphorothioate
  modified_base 2: mod_base = OTHER; note = 2'-deoxy-2'-fluorocytidine-3'-phosphorothioate
  modified_base 3: mod_base = OTHER; note = 2'-O-methylcytidine-3'-phosphate
  modified_base 4: mod_base = OTHER; note = 2'-O-methylguanosine-3'-phosphate
  modified_base 5: mod_base = OTHER; note = 2'-O-methyluridine-3'-phosphate
  modified_base 6: mod_base = OTHER; note = 2'-deoxy-2'-fluorocytidine-3'-phosphate
  modified_base 7: mod_base = OTHER; note = 2'-O-methylcytidine-3'-phosphate
  modified_base 8: mod_base = OTHER; note = 2'-deoxy-2'-fluoroadenosine-3'-phosphate
  modified_base 9: mod_base = OTHER; note = 2'-deoxy-2'-fluorouridine-3'-phosphate
  modified_base 10: mod_base = OTHER; note = 2'-O-methylguanosine-3'-phosphate
  modified_base 11: mod_base = OTHER; note = 2'-O-methyluridine-3'-phosphate
  modified_base 12: mod_base = OTHER; note = 2'-O-methylguanosine-3'-phosphate
  modified_base 13: mod_base = OTHER; note = 2'-O-methyladenosine-3'-phosphate
  modified_base 14: mod_base = OTHER; note = 2'-deoxy-2'-fluorouridine-3'-phosphate
  modified_base 15: mod_base = OTHER; note = 2'-O-methyluridine-3'-phosphate
  modified_base 16: mod_base = OTHER; note = 2'-deoxy-2'-fluorocytidine-3'-phosphate
  modified_base 17: mod_base = OTHER; note = 2'-O-methyluridine-3'-phosphate
  modified_base 18: mod_base = OTHER; note = 2'-O-methylguanosine-3'-phosphate
  modified_base 19: mod_base = OTHER; note = 2'-O-methyluridine-3'-phosphate
  modified_base 20: mod_base = OTHER; note = 2'-O-methyladenosine-3'-phosphate
  modified_base 21: mod_base = OTHER; note = 2'-O-methyladenosine-3'-phosphorothioate
  modified_base 22: mod_base = OTHER; note = 2'-O-methylcytidine-3'-phosphorothioate
  modified_base 23: mod_base = OTHER; note = 2'-O-methyluridine
accgtccatgtgattctgtaact

SEQ ID NO: 1185 - RNA, 23 nt, synthetic construct
  source 1..23: mol_type = other RNA
  modified_base 1: mod_base = OTHER; note = 2'-O-methyladenosine-3'-phosphorothioate
  modified_base 2: mod_base = OTHER; note = 2'-deoxy-2'-fluorocytidine-3'-phosphorothioate
  modified_base 3: mod_base = OTHER; note = 2'-O-methyladenosine-3'-phosphate
  modified_base 4: mod_base = OTHER; note = 2'-O-methylguanosine-3'-phosphate
  modified_base 5: mod_base = OTHER; note = 2'-O-methyluridine-3'-phosphate
  modified_base 6: mod_base = OTHER; note = 2'-deoxy-2'-fluorocytidine-3'-phosphate
  modified_base 7: mod_base = OTHER; note = 2'-O-methyladenosine-3'-phosphate
  modified_base 8: mod_base = OTHER; note = 2'-deoxy-2'-fluoroguanosine-3'-phosphate
  modified_base 9: mod_base = OTHER; note = 2'-deoxy-2'-fluorouridine-3'-phosphate
  modified_base 10: mod_base = OTHER; note = 2'-O-methyluridine-3'-phosphate
  modified_base 11: mod_base = OTHER; note = 2'-O-methyladenosine-3'-phosphate
  modified_base 12: mod_base = OTHER; note = 2'-O-methyluridine-3'-phosphate
  modified_base 13: mod_base = OTHER; note = 2'-O-methyluridine-3'-phosphate
  modified_base 14: mod_base = OTHER; note = 2'-deoxy-2'-fluorocytidine-3'-phosphate
  modified_base 15: mod_base = OTHER; note = 2'-O-methylcytidine-3'-phosphate
  modified_base 16: mod_base = OTHER; note = 2'-deoxy-2'-fluoroadenosine-3'-phosphate
  modified_base 17: mod_base = OTHER; note = 2'-O-methyluridine-3'-phosphate
  modified_base 18: mod_base = OTHER; note = 2'-O-methyluridine-3'-phosphate
  modified_base 19: mod_base = OTHER; note = 2'-O-methyladenosine-3'-phosphate
  modified_base 20: mod_base = OTHER; note = 2'-O-methyluridine-3'-phosphate
  modified_base 21: mod_base = OTHER; note = 2'-O-methyladenosine-3'-phosphorothioate
  modified_base 22: mod_base = OTHER; note = 2'-O-methyluridine-3'-phosphorothioate
  modified_base 23: mod_base = OTHER; note = 2'-O-methyladenosine
acagtcagttattccattatata

SEQ ID NO: 1186 - RNA, 23 nt, synthetic construct
  source 1..23: mol_type = other RNA
  modified_base 1: mod_base = OTHER; note = 2'-O-methyladenosine-3'-phosphorothioate
  modified_base 2: mod_base = OTHER; note = 2'-deoxy-2'-fluoroadenosine-3'-phosphorothioate
  modified_base 3: mod_base = OTHER; note = 2'-O-methyluridine-3'-phosphate
  modified_base 4: mod_base = OTHER; note = 2'-O-methyladenosine-3'-phosphate
  modified_base 5: mod_base = OTHER; note = 2'-O-methyladenosine-3'-phosphate
  modified_base 6: mod_base = OTHER; note = 2'-deoxy-2'-fluoroadenosine-3'-phosphate
  modified_base 7: mod_base = OTHER; note = 2'-O-methylcytidine-3'-phosphate
  modified_base 8: mod_base = OTHER; note = 2'-deoxy-2'-fluorocytidine-3'-phosphate
  modified_base 9: mod_base = OTHER; note = 2'-deoxy-2'-fluorocytidine-3'-phosphate
  modified_base 10: mod_base = OTHER; note = 2'-O-methyladenosine-3'-phosphate
  modified_base 11: mod_base = OTHER; note = 2'-O-methylguanosine-3'-phosphate
  modified_base 12: mod_base = OTHER; note = 2'-O-methyluridine-3'-phosphate
  modified_base 13: mod_base = OTHER; note = 2'-O-methylcytidine-3'-phosphate
  modified_base 14: mod_base = OTHER; note = 2'-deoxy-2'-fluoroadenosine-3'-phosphate
  modified_base 15: mod_base = OTHER; note = 2'-O-methylguanosine-3'-phosphate
  modified_base 16: mod_base = OTHER; note = 2'-deoxy-2'-fluorouridine-3'-phosphate
  modified_base 17: mod_base = OTHER; note = 2'-O-methyluridine-3'-phosphate
  modified_base 18: mod_base = OTHER; note = 2'-O-methyladenosine-3'-phosphate
  modified_base 19: mod_base = OTHER; note = 2'-O-methyluridine-3'-phosphate
  modified_base 20: mod_base = OTHER; note = 2'-O-methyluridine-3'-phosphate
  modified_base 21: mod_base = OTHER; note = 2'-O-methylcytidine-3'-phosphorothioate
  modified_base 22: mod_base = OTHER; note = 2'-O-methylcytidine-3'-phosphorothioate
  modified_base 23: mod_base = OTHER; note = 2'-O-methyladenosine
aataaacccagtcagttattcca

SEQ ID NO: 1187 - RNA, 23 nt, synthetic construct
  source 1..23: mol_type = other RNA
  modified_base 1: mod_base = OTHER; note = 2'-O-methyladenosine-3'-phosphorothioate
  modified_base 2: mod_base = OTHER; note = 2'-deoxy-2'-fluorouridine-3'-phosphorothioate
  modified_base 3: mod_base = OTHER; note = 2'-O-methylcytidine-3'-phosphate
  modified_base 4: mod_base = OTHER; note = 2'-O-methylcytidine-3'-phosphate
  modified_base 5: mod_base = OTHER; note = 2'-O-methyluridine-3'-phosphate
  modified_base 6: mod_base = OTHER; note = 2'-deoxy-2'-fluorocytidine-3'-phosphate
  modified_base 7: mod_base = OTHER; note = 2'-O-methyluridine-3'-phosphate
  modified_base 8: mod_base = OTHER; note = 2'-deoxy-2'-fluorouridine-3'-phosphate
  modified_base 9: mod_base = OTHER; note = 2'-deoxy-2'-fluorocytidine-3'-phosphate
  modified_base 10: mod_base = OTHER; note = 2'-O-methyladenosine-3'-phosphate
  modified_base 11: mod_base = OTHER; note = 2'-O-methyluridine-3'-phosphate
  modified_base 12: mod_base = OTHER; note = 2'-O-methyladenosine-3'-phosphate
  modified_base 13: mod_base = OTHER; note = 2'-O-methyladenosine-3'-phosphate
  modified_base 14: mod_base = OTHER; note = 2'-deoxy-2'-fluoroadenosine-3'-phosphate
  modified_base 15: mod_base = OTHER; note = 2'-O-methylcytidine-3'-phosphate
  modified_base 16: mod_base = OTHER; note = 2'-deoxy-2'-fluorocytidine-3'-phosphate
  modified_base 17: mod_base = OTHER; note = 2'-O-methylcytidine-3'-phosphate
  modified_base 18: mod_base = OTHER; note = 2'-O-methyladenosine-3'-phosphate
  modified_base 19: mod_base = OTHER; note = 2'-O-methylguanosine-3'-phosphate
  modified_base 20: mod_base = OTHER; note = 2'-O-methyluridine-3'-phosphate
  modified_base 21: mod_base = OTHER; note = 2'-O-methylcytidine-3'-phosphorothioate
  modified_base 22: mod_base = OTHER; note = 2'-O-methyladenosine-3'-phosphorothioate
  modified_base 23: mod_base = OTHER; note = 2'-O-methylguanosine
atcctcttcataaacccagtcag

SEQ ID NO: 1188 - RNA, 23 nt, synthetic construct
  source 1..23: mol_type = other RNA
  modified_base 1: mod_base = OTHER; note = 2'-O-methyladenosine-3'-phosphorothioate
  modified_base 2: mod_base = OTHER; note = 2'-deoxy-2'-fluoroadenosine-3'-phosphorothioate
  modified_base 3: mod_base = OTHER; note = 2'-O-methyladenosine-3'-phosphate
  modified_base 4: mod_base = OTHER; note = 2'-O-methylguanosine-3'-phosphate
  modified_base 5: mod_base = OTHER; note = 2'-O-methyladenosine-3'-phosphate
  modified_base 6: mod_base = OTHER; note = 2'-deoxy-2'-fluorocytidine-3'-phosphate
  modified_base 7: mod_base = OTHER; note = 2'-O-methyluridine-3'-phosphate
  modified_base 8: mod_base = OTHER; note = 2'-deoxy-2'-fluorouridine-3'-phosphate
  modified_base 9: mod_base = OTHER; note = 2'-deoxy-2'-fluorocytidine-3'-phosphate
  modified_base 10: mod_base = OTHER; note = 2'-O-methylcytidine-3'-phosphate
  modified_base 11: mod_base = OTHER; note = 2'-O-methyluridine-3'-phosphate
  modified_base 12: mod_base = OTHER; note = 2'-O-methylcytidine-3'-phosphate
  modified_base 13: mod_base = OTHER; note = 2'-O-methyluridine-3'-phosphate
  modified_base 14: mod_base = OTHER; note = 2'-deoxy-2'-fluorouridine-3'-phosphate
  modified_base 15: mod_base = OTHER; note = 2'-O-methylcytidine-3'-phosphate
  modified_base 16: mod_base = OTHER; note = 2'-deoxy-2'-fluoroadenosine-3'-phosphate
  modified_base 17: mod_base = OTHER; note = 2'-O-methyluridine-3'-phosphate
  modified_base 18: mod_base = OTHER; note = 2'-O-methyladenosine-3'-phosphate
  modified_base 19: mod_base = OTHER; note = 2'-O-methyladenosine-3'-phosphate
  modified_base 20: mod_base = OTHER; note = 2'-O-methyladenosine-3'-phosphate
  modified_base 21: mod_base = OTHER; note = 2'-O-methylcytidine-3'-phosphorothioate
  modified_base 22: mod_base = OTHER; note = 2'-O-methylcytidine-3'-phosphorothioate
  modified_base 23: mod_base = OTHER; note = 2'-O-methylcytidine
aaagacttcctcttcataaaccc

SEQ ID NO: 1189 - RNA, 23 nt, synthetic construct
  source 1..23: mol_type = other RNA
  modified_base 1: mod_base = OTHER; note = 2'-O-methyladenosine-3'-phosphorothioate
  modified_base 2: mod_base = OTHER; note = 2'-deoxy-2'-fluoroguanosine-3'-phosphorothioate
  modified_base 3: mod_base = OTHER; note = 2'-O-methylcytidine-3'-phosphate
  modified_base 4: mod_base = OTHER; note = 2'-O-methyladenosine-3'-phosphate
  modified_base 5: mod_base = OTHER; note = 2'-O-methylcytidine-3'-phosphate
  modified_base 6: mod_base = OTHER; note = 2'-deoxy-2'-fluorouridine-3'-phosphate
  modified_base 7: mod_base = OTHER; note = 2'-O-methylguanosine-3'-phosphate
  modified_base 8: mod_base = OTHER; note = 2'-deoxy-2'-fluoroadenosine-3'-phosphate
  modified_base 9: mod_base = OTHER; note = 2'-deoxy-2'-fluoroadenosine-3'-phosphate
  modified_base 10: mod_base = OTHER; note = 2'-O-methylguanosine-3'-phosphate
  modified_base 11: mod_base = OTHER; note = 2'-O-methyladenosine-3'-phosphate
  modified_base 12: mod_base = OTHER; note = 2'-O-methylcytidine-3'-phosphate
  modified_base 13: mod_base = OTHER; note = 2'-O-methyluridine-3'-phosphate
  modified_base 14: mod_base = OTHER; note = 2'-deoxy-2'-fluorouridine-3'-phosphate
  modified_base 15: mod_base = OTHER; note = 2'-O-methylcytidine-3'-phosphate
  modified_base 16: mod_base = OTHER; note = 2'-deoxy-2'-fluorocytidine-3'-phosphate
  modified_base 17: mod_base = OTHER; note = 2'-O-methyluridine-3'-phosphate
  modified_base 18: mod_base = OTHER; note = 2'-O-methylcytidine-3'-phosphate
  modified_base 19: mod_base = OTHER; note = 2'-O-methyluridine-3'-phosphate
  modified_base 20: mod_base = OTHER; note = 2'-O-methyluridine-3'-phosphate
  modified_base 21: mod_base = OTHER; note = 2'-O-methylcytidine-3'-phosphorothioate
  modified_base 22: mod_base = OTHER; note = 2'-O-methyladenosine-3'-phosphorothioate
  modified_base 23: mod_base = OTHER; note = 2'-O-methyluridine
agcactgaagacttcctcttcat

SEQ ID NO: 1190 - RNA, 23 nt, synthetic construct
  source 1..23: mol_type = other RNA
  modified_base 1: mod_base = OTHER; note = 2'-O-methyladenosine-3'-phosphorothioate
  modified_base 2: mod_base = OTHER; note = 2'-deoxy-2'-fluoroadenosine-3'-phosphorothioate
  modified_base 3: mod_base = OTHER; note = 2'-O-methylguanosine-3'-phosphate
  modified_base 4: mod_base = OTHER; note = 2'-O-methyladenosine-3'-phosphate
  modified_base 5: mod_base = OTHER; note = 2'-O-methylguanosine-3'-phosphate
  modified_base 6: mod_base = OTHER; note = 2'-deoxy-2'-fluorouridine-3'-phosphate
  modified_base 7: mod_base = OTHER; note = 2'-O-methyladenosine-3'-phosphate
  modified_base 8: mod_base = OTHER; note = 2'-deoxy-2'-fluoroguanosine-3'-phosphate
  modified_base 9: mod_base = OTHER; note = 2'-deoxy-2'-fluoroguanosine-3'-phosphate
  modified_base 10: mod_base = OTHER; note = 2'-O-methylcytidine-3'-phosphate
  modified_base 11: mod_base = OTHER; note = 2'-O-methyladenosine-3'-phosphate
  modified_base 12: mod_base = OTHER; note = 2'-O-methylcytidine-3'-phosphate
  modified_base 13: mod_base = OTHER; note = 2'-O-methyluridine-3'-phosphate
  modified_base 14: mod_base = OTHER; note = 2'-deoxy-2'-fluoroguanosine-3'-phosphate
  modified_base 15: mod_base = OTHER; note = 2'-O-methyladenosine-3'-phosphate
  modified_base 16: mod_base = OTHER; note = 2'-deoxy-2'-fluoroadenosine-3'-phosphate
  modified_base 17: mod_base = OTHER; note = 2'-O-methylguanosine-3'-phosphate
  modified_base 18: mod_base = OTHER; note = 2'-O-methyladenosine-3'-phosphate
  modified_base 19: mod_base = OTHER; note = 2'-O-methylcytidine-3'-phosphate
  modified_base 20: mod_base = OTHER; note = 2'-O-methyluridine-3'-phosphate
  modified_base 21: mod_base = OTHER; note = 2'-O-methyluridine-3'-phosphorothioate
  modified_base 22: mod_base = OTHER; note = 2'-O-methylcytidine-3'-phosphorothioate
  modified_base 23: mod_base = OTHER; note = 2'-O-methylcytidine
aagagtaggcactgaagacttcc

SEQ ID NO: 1191 - RNA, 23 nt, synthetic construct
  source 1..23: mol_type = other RNA
  modified_base 1: mod_base = OTHER; note = 2'-O-methyladenosine-3'-phosphorothioate
  modified_base 2: mod_base = OTHER; note = 2'-deoxy-2'-fluoroadenosine-3'-phosphorothioate
  modified_base 3: mod_base = OTHER; note = 2'-O-methylcytidine-3'-phosphate
  modified_base 4: mod_base = OTHER; note = 2'-O-methylcytidine-3'-phosphate
  modified_base 5: mod_base = OTHER; note = 2'-O-methyladenosine-3'-phosphate
  modified_base 6: mod_base = OTHER; note = 2'-deoxy-2'-fluorocytidine-3'-phosphate
  modified_base 7: mod_base = OTHER; note = 2'-O-methyladenosine-3'-phosphate
  modified_base 8: mod_base = OTHER; note = 2'-deoxy-2'-fluoroguanosine-3'-phosphate
  modified_base 9: mod_base = OTHER; note = 2'-deoxy-2'-fluoroadenosine-3'-phosphate
  modified_base 10: mod_base = OTHER; note = 2'-O-methylguanosine-3'-phosphate
  modified_base 11: mod_base = OTHER; note = 2'-O-methylcytidine-3'-phosphate
  modified_base 12: mod_base = OTHER; note = 2'-O-methyladenosine-3'-phosphate
  modified_base 13: mod_base = OTHER; note = 2'-O-methylguanosine-3'-phosphate
  modified_base 14: mod_base = OTHER; note = 2'-deoxy-2'-fluoroadenosine-3'-phosphate
  modified_base 15: mod_base = OTHER; note = 2'-O-methylguanosine-3'-phosphate
  modified_base 16: mod_base = OTHER; note = 2'-deoxy-2'-fluorouridine-3'-phosphate
  modified_base 17: mod_base = OTHER; note = 2'-O-methyladenosine-3'-phosphate
  modified_base 18: mod_base = OTHER; note = 2'-O-methylguanosine-3'-phosphate
  modified_base 19: mod_base = OTHER; note = 2'-O-methylguanosine-3'-phosphate
  modified_base 20: mod_base = OTHER; note = 2'-O-methylcytidine-3'-phosphate
  modified_base 21: mod_base = OTHER; note = 2'-O-methyladenosine-3'-phosphorothioate
  modified_base 22: mod_base = OTHER; note = 2'-O-methylcytidine-3'-phosphorothioate
  modified_base 23: mod_base = OTHER; note = 2'-O-methyluridine
aaccacagagcagagtaggcact

SEQ ID NO: 1192 - RNA, 23 nt, synthetic construct
  source 1..23: mol_type = other RNA
  modified_base 1: mod_base = OTHER; note = 2'-O-methyladenosine-3'-phosphorothioate
  modified_base 2: mod_base = OTHER; note = 2'-deoxy-2'-fluorocytidine-3'-phosphorothioate
  modified_base 3: mod_base = OTHER; note = 2'-O-methylguanosine-3'-phosphate
  modified_base 4: mod_base = OTHER; note = 2'-O-methyluridine-3'-phosphate
  modified_base 5: mod_base = OTHER; note = 2'-O-methyluridine-3'-phosphate
  modified_base 6: mod_base = OTHER; note = 2'-deoxy-2'-fluorouridine-3'-phosphate
  modified_base 7: mod_base = OTHER; note = 2'-O-methylguanosine-3'-phosphate
  modified_base 8: mod_base = OTHER; note = 2'-deoxy-2'-fluoroguanosine-3'-phosphate
  modified_base 9: mod_base = OTHER; note = 2'-deoxy-2'-fluoroadenosine-3'-phosphate
  modified_base 10: mod_base = OTHER; note = 2'-O-methylguanosine-3'-phosphate
  modified_base 11: mod_base = OTHER; note = 2'-O-methyladenosine-3'-phosphate
  modified_base 12: mod_base = OTHER; note = 2'-O-methylcytidine-3'-phosphate
  modified_base 13: mod_base = OTHER; note = 2'-O-methylcytidine-3'-phosphate
  modified_base 14: mod_base = OTHER; note = 2'-deoxy-2'-fluoroadenosine-3'-phosphate
  modified_base 15: mod_base = OTHER; note = 2'-O-methylcytidine-3'-phosphate
  modified_base 16: mod_base = OTHER; note = 2'-deoxy-2'-fluorocytidine-3'-phosphate
  modified_base 17: mod_base = OTHER; note = 2'-O-methyladenosine-3'-phosphate
  modified_base 18: mod_base = OTHER; note = 2'-O-methylcytidine-3'-phosphate
  modified_base 19: mod_base = OTHER; note = 2'-O-methyladenosine-3'-phosphate
  modified_base 20: mod_base = OTHER; note = 2'-O-methylguanosine-3'-phosphate
  modified_base 21: mod_base = OTHER; note = 2'-O-methyladenosine-3'-phosphorothioate
  modified_base 22: mod_base = OTHER; note = 2'-O-methylguanosine-3'-phosphorothioate
  modified_base 23: mod_base = OTHER; note = 2'-O-methylcytidine
acgtttggagaccaccacagagc

SEQ ID NO: 1193 - RNA, 23 nt, synthetic construct
  source 1..23: mol_type = other RNA
  modified_base 1: mod_base = OTHER; note = 2'-O-methyladenosine-3'-phosphorothioate
  modified_base 2: mod_base = OTHER; note = 2'-deoxy-2'-fluoroadenosine-3'-phosphorothioate
  modified_base 3: mod_base = OTHER; note = 2'-O-methyladenosine-3'-phosphate
  modified_base 4: mod_base = OTHER; note = 2'-O-methyladenosine-3'-phosphate
  modified_base 5: mod_base = OTHER; note = 2'-O-methyladenosine-3'-phosphate
  modified_base 6: mod_base = OTHER; note = 2'-deoxy-2'-fluoroguanosine-3'-phosphate
  modified_base 7: mod_base = OTHER; note = 2'-O-methyluridine-3'-phosphate
  modified_base 8: mod_base = OTHER; note = 2'-deoxy-2'-fluoroguanosine-3'-phosphate
  modified_base 9: mod_base = OTHER; note = 2'-deoxy-2'-fluorocytidine-3'-phosphate
  modified_base 10: mod_base = OTHER; note = 2'-O-methylcytidine-3'-phosphate
  modified_base 11: mod_base = OTHER; note = 2'-O-methylguanosine-3'-phosphate
  modified_base 12: mod_base = OTHER; note = 2'-O-methyluridine-3'-phosphate
  modified_base 13: mod_base = OTHER; note = 2'-O-methyluridine-3'-phosphate
  modified_base 14: mod_base = OTHER; note = 2'-deoxy-2'-fluorouridine-3'-phosphate
  modified_base 15: mod_base = OTHER; note = 2'-O-methylguanosine-3'-phosphate
  modified_base 16: mod_base = OTHER; note = 2'-deoxy-2'-fluoroguanosine-3'-phosphate
  modified_base 17: mod_base = OTHER; note = 2'-O-methyladenosine-3'-phosphate
  modified_base 18: mod_base = OTHER; note = 2'-O-methylguanosine-3'-phosphate
  modified_base 19: mod_base = OTHER; note = 2'-O-methyladenosine-3'-phosphate
  modified_base 20: mod_base = OTHER; note = 2'-O-methylcytidine-3'-phosphate
  modified_base 21: mod_base = OTHER; note = 2'-O-methylcytidine-3'-phosphorothioate
  modified_base 22: mod_base = OTHER; note = 2'-O-methyladenosine-3'-phosphorothioate
  modified_base 23: mod_base = OTHER; note = 2'-O-methylcytidine
aaaaagtgccgtttggagaccac

SEQ ID NO: 1194 - RNA, 23 nt, synthetic construct
  source 1..23: mol_type = other RNA
  modified_base 1: mod_base = OTHER; note = 2'-O-methyladenosine-3'-phosphorothioate
  modified_base 2: mod_base = OTHER; note = 2'-deoxy-2'-fluoroguanosine-3'-phosphorothioate
  modified_base 3: mod_base = OTHER; note = 2'-O-methyluridine-3'-phosphate
  modified_base 4: mod_base = OTHER; note = 2'-O-methyluridine-3'-phosphate
  modified_base 5: mod_base = OTHER; note = 2'-O-methyladenosine-3'-phosphate
  modified_base 6: mod_base = OTHER; note = 2'-deoxy-2'-fluoroadenosine-3'-phosphate
  modified_base 7: mod_base = OTHER; note = 2'-O-methyladenosine-3'-phosphate
  modified_base 8: mod_base = OTHER; note = 2'-deoxy-2'-fluorouridine-3'-phosphate
  modified_base 9: mod_base = OTHER; note = 2'-deoxy-2'-fluorouridine-3'-phosphate
  modified_base 10: mod_base = OTHER; note = 2'-O-methylguanosine-3'-phosphate
  modified_base 11: mod_base = OTHER; note = 2'-O-methylguanosine-3'-phosphate
  modified_base 12: mod_base = OTHER; note = 2'-O-methylguanosine-3'-phosphate
  modified_base 13: mod_base = OTHER; note = 2'-O-methylcytidine-3'-phosphate
  modified_base 14: mod_base = OTHER; note = 2'-deoxy-2'-fluoroadenosine-3'-phosphate
  modified_base 15: mod_base = OTHER; note = 2'-O-methyluridine-3'-phosphate
  modified_base 16: mod_base = OTHER; note = 2'-deoxy-2'-fluoroadenosine-3'-phosphate
  modified_base 17: mod_base = OTHER; note = 2'-O-methyluridine-3'-phosphate
  modified_base 18: mod_base = OTHER; note = 2'-O-methylguanosine-3'-phosphate
  modified_base 19: mod_base = OTHER; note = 2'-O-methylcytidine-3'-phosphate
  modified_base 20: mod_base = OTHER; note = 2'-O-methyluridine-3'-phosphate
  modified_base 21: mod_base = OTHER; note = 2'-O-methyladenosine-3'-phosphorothioate
  modified_base 22: mod_base = OTHER; note = 2'-O-methyladenosine-3'-phosphorothioate
  modified_base 23: mod_base = OTHER; note = 2'-O-methyladenosine
agttaaattgggcatatgctaaa

SEQ ID NO: 1195 - RNA, 23 nt, synthetic construct
  source 1..23: mol_type = other RNA
  modified_base 1: mod_base = OTHER; note = 2'-O-methyladenosine-3'-phosphorothioate
  modified_base 2: mod_base = OTHER; note = 2'-deoxy-2'-fluorocytidine-3'-phosphorothioate
  modified_base 3: mod_base = OTHER; note = 2'-O-methyluridine-3'-phosphate
  modified_base 4: mod_base = OTHER; note = 2'-O-methylguanosine-3'-phosphate
  modified_base 5: mod_base = OTHER; note = 2'-O-methyluridine-3'-phosphate
  modified_base 6: mod_base = OTHER; note = 2'-deoxy-2'-fluoroguanosine-3'-phosphate
  modified_base 7: mod_base = OTHER; note = 2'-O-methyluridine-3'-phosphate
  modified_base 8: mod_base = OTHER; note = 2'-deoxy-2'-fluorocytidine-3'-phosphate
  modified_base 9: mod_base = OTHER; note = 2'-deoxy-2'-fluoroguanosine-3'-phosphate
  modified_base 10: mod_base = OTHER; note = 2'-O-methyluridine-3'-phosphate
  modified_base 11: mod_base = OTHER; note = 2'-O-methyluridine-3'-phosphate
  modified_base 12: mod_base = OTHER; note = 2'-O-methyladenosine-3'-phosphate
  modified_base 13: mod_base = OTHER; note = 2'-O-methyladenosine-3'-phosphate
  modified_base 14: mod_base = OTHER; note = 2'-deoxy-2'-fluoroadenosine-3'-phosphate
  modified_base 15: mod_base = OTHER; note = 2'-O-methyluridine-3'-phosphate
  modified_base 16: mod_base = OTHER; note = 2'-deoxy-2'-fluorouridine-3'-phosphate
  modified_base 17: mod_base = OTHER; note = 2'-O-methylguanosine-3'-phosphate
  modified_base 18: mod_base = OTHER; note = 2'-O-methylguanosine-3'-phosphate
  modified_base 19: mod_base = OTHER; note = 2'-O-methylguanosine-3'-phosphate
  modified_base 20: mod_base = OTHER; note = 2'-O-methylcytidine-3'-phosphate
  modified_base 21: mod_base = OTHER; note = 2'-O-methyladenosine-3'-phosphorothioate
  modified_base 22: mod_base = OTHER; note = 2'-O-methyluridine-3'-phosphorothioate
  modified_base 23: mod_base = OTHER; note = 2'-O-methyladenosine
actgtgtcgttaaattgggcata

SEQ ID NO: 1196 - RNA, 23 nt, synthetic construct
  source 1..23: mol_type = other RNA
  modified_base 1: mod_base = OTHER; note = 2'-O-methyladenosine-3'-phosphorothioate
  modified_base 2: mod_base = OTHER; note = 2'-deoxy-2'-fluoroguanosine-3'-phosphorothioate
  modified_base 3: mod_base = OTHER; note = 2'-O-methylguanosine-3'-phosphate
  modified_base 4: mod_base = OTHER; note = 2'-O-methylguanosine-3'-phosphate
  modified_base 5: mod_base = OTHER; note = 2'-O-methyladenosine-3'-phosphate
  modified_base 6: mod_base = OTHER; note = 2'-deoxy-2'-fluorocytidine-3'-phosphate
  modified_base 7: mod_base = OTHER; note = 2'-O-methyluridine-3'-phosphate
  modified_base 8: mod_base = OTHER; note = 2'-deoxy-2'-fluorouridine-3'-phosphate
  modified_base 9: mod_base = OTHER; note = 2'-deoxy-2'-fluorocytidine-3'-phosphate
  modified_base 10: mod_base = OTHER; note = 2'-O-methyluridine-3'-phosphate
  modified_base 11: mod_base = OTHER; note = 2'-O-methylguanosine-3'-phosphate
  modified_base 12: mod_base = OTHER; note = 2'-O-methyluridine-3'-phosphate
  modified_base 13: mod_base = OTHER; note = 2'-O-methylguanosine-3'-phosphate
  modified_base 14: mod_base = OTHER; note = 2'-deoxy-2'-fluorouridine-3'-phosphate
  modified_base 15: mod_base = OTHER; note = 2'-O-methylcytidine-3'-phosphate
  modified_base 16: mod_base = OTHER; note = 2'-deoxy-2'-fluoroguanosine-3'-phosphate
  modified_base 17: mod_base = OTHER; note = 2'-O-methyluridine-3'-phosphate
  modified_base 18: mod_base = OTHER; note = 2'-O-methyluridine-3'-phosphate
  modified_base 19: mod_base = OTHER; note = 2'-O-methyladenosine-3'-phosphate
  modified_base 20: mod_base = OTHER; note = 2'-O-methyladenosine-3'-phosphate
  modified_base 21: mod_base = OTHER; note = 2'-O-methyladenosine-3'-phosphorothioate
  modified_base 22: mod_base = OTHER; note = 2'-O-methyluridine-3'-phosphorothioate
  modified_base 23: mod_base = OTHER; note = 2'-O-methyluridine
agggacttctgtgtcgttaaatt

SEQ ID NO: 1197 - RNA, 23 nt, synthetic construct
  source 1..23: mol_type = other RNA
  modified_base 1: mod_base = OTHER; note = 2'-O-methyladenosine-3'-phosphorothioate
  modified_base 2: mod_base = OTHER; note = 2'-deoxy-2'-fluorouridine-3'-phosphorothioate
  modified_base 3: mod_base = OTHER; note = 2'-O-methylcytidine-3'-phosphate
  modified_base 4: mod_base = OTHER; note = 2'-O-methyladenosine-3'-phosphate
  modified_base 5: mod_base = OTHER; note = 2'-O-methyladenosine-3'-phosphate
  modified_base 6: mod_base = OTHER; note = 2'-deoxy-2'-fluorouridine-3'-phosphate
  modified_base 7: mod_base = OTHER; note = 2'-O-methyladenosine-3'-phosphate
  modified_base 8: mod_base = OTHER; note = 2'-deoxy-2'-fluoroadenosine-3'-phosphate
  modified_base 9: mod_base = OTHER; note = 2'-deoxy-2'-fluoroguanosine-3'-phosphate
  modified_base 10: mod_base = OTHER; note = 2'-O-methyluridine-3'-phosphate
  modified_base 11: mod_base = OTHER; note = 2'-O-methylguanosine-3'-phosphate
  modified_base 12: mod_base = OTHER; note = 2'-O-methylguanosine-3'-phosphate
  modified_base 13: mod_base = OTHER; note = 2'-O-methylguanosine-3'-phosphate
  modified_base 14: mod_base = OTHER; note = 2'-deoxy-2'-fluoroadenosine-3'-phosphate
  modified_base 15: mod_base = OTHER; note = 2'-O-methylcytidine-3'-phosphate
  modified_base 16: mod_base = OTHER; note = 2'-deoxy-2'-fluorouridine-3'-phosphate
  modified_base 17: mod_base = OTHER; note = 2'-O-methyluridine-3'-phosphate
  modified_base 18: mod_base = OTHER; note = 2'-O-methylcytidine-3'-phosphate
  modified_base 19: mod_base = OTHER; note = 2'-O-methyluridine-3'-phosphate
  modified_base 20: mod_base = OTHER; note = 2'-O-methylguanosine-3'-phosphate
  modified_base 21: mod_base = OTHER; note = 2'-O-methyluridine-3'-phosphorothioate
  modified_base 22: mod_base = OTHER; note = 2'-O-methylguanosine-3'-phosphorothioate
  modified_base 23: mod_base = OTHER; note = 2'-O-methyluridine
atcaataagtgggacttctgtgt

SEQ ID NO: 1198 - RNA, 23 nt, synthetic construct
  source 1..23: mol_type = other RNA
  modified_base 1: mod_base = OTHER; note = 2'-O-methyladenosine-3'-phosphorothioate
  modified_base 2: mod_base = OTHER; note = 2'-deoxy-2'-fluoroguanosine-3'-phosphorothioate
  modified_base 3: mod_base = OTHER; note = 2'-O-methyladenosine-3'-phosphate
  modified_base 4: mod_base = OTHER; note = 2'-O-methylguanosine-3'-phosphate
  modified_base 5: mod_base = OTHER; note = 2'-O-methyluridine-3'-phosphate
  modified_base 6: mod_base = OTHER; note = 2'-deoxy-2'-fluoroadenosine-3'-phosphate
  modified_base 7: mod_base = OTHER; note = 2'-O-methyluridine-3'-phosphate
  modified_base 8: mod_base = OTHER; note = 2'-deoxy-2'-fluorouridine-3'-phosphate
  modified_base 9: mod_base = OTHER; note = 2'-deoxy-2'-fluorocytidine-3'-phosphate
  modified_base 10: mod_base = OTHER; note = 2'-O-methyladenosine-3'-phosphate
  modified_base 11: mod_base = OTHER; note = 2'-O-methyladenosine-3'-phosphate
  modified_base 12: mod_base = OTHER; note = 2'-O-methyluridine-3'-phosphate
  modified_base 13: mod_base = OTHER; note = 2'-O-methyladenosine-3'-phosphate
  modified_base 14: mod_base = OTHER; note = 2'-deoxy-2'-fluoroadenosine-3'-phosphate
  modified_base 15: mod_base = OTHER; note = 2'-O-methylguanosine-3'-phosphate
  modified_base 16: mod_base = OTHER; note = 2'-deoxy-2'-fluorouridine-3'-phosphate
  modified_base 17: mod_base = OTHER; note = 2'-O-methylguanosine-3'-phosphate
  modified_base 18: mod_base = OTHER; note = 2'-O-methylguanosine-3'-phosphate
  modified_base 19: mod_base = OTHER; note = 2'-O-methylguanosine-3'-phosphate
  modified_base 20: mod_base = OTHER; note = 2'-O-methyladenosine-3'-phosphate
  modified_base 21: mod_base = OTHER; note = 2'-O-methylcytidine-3'-phosphorothioate
  modified_base 22: mod_base = OTHER; note = 2'-O-methyluridine-3'-phosphorothioate
  modified_base 23: mod_base = OTHER; note = 2'-O-methyluridine
agagtattcaataagtgggactt

SEQ ID NO: 1199 - RNA, 23 nt, synthetic construct
  source 1..23: mol_type = other RNA
  modified_base 1: mod_base = OTHER; note = 2'-O-methyladenosine-3'-phosphorothioate
  modified_base 2: mod_base = OTHER; note = 2'-deoxy-2'-fluoroadenosine-3'-phosphorothioate
  modified_base 3: mod_base = OTHER; note = 2'-O-methylguanosine-3'-phosphate
  modified_base 4: mod_base = OTHER; note = 2'-O-methyluridine-3'-phosphate
  modified_base 5: mod_base = OTHER; note = 2'-O-methyladenosine-3'-phosphate
  modified_base 6: mod_base = OTHER; note = 2'-deoxy-2'-fluoroguanosine-3'-phosphate
  modified_base 7: mod_base = OTHER; note = 2'-O-methyladenosine-3'-phosphate
  modified_base 8: mod_base = OTHER; note = 2'-deoxy-2'-fluoroadenosine-3'-phosphate
  modified_base 9: mod_base = OTHER; note = 2'-deoxy-2'-fluoroguanosine-3'-phosphate
  modified_base 10: mod_base = OTHER; note = 2'-O-methylguanosine-3'-phosphate
  modified_base 11: mod_base = OTHER; note = 2'-O-methyladenosine-3'-phosphate
  modified_base 12: mod_base = OTHER; note = 2'-O-methylguanosine-3'-phosphate
  modified_base 13: mod_base = OTHER; note = 2'-O-methyluridine-3'-phosphate
  modified_base 14: mod_base = OTHER; note = 2'-deoxy-2'-fluoroadenosine-3'-phosphate
  modified_base 15: mod_base = OTHER; note = 2'-O-methyluridine-3'-phosphate
  modified_base 16: mod_base = OTHER; note = 2'-deoxy-2'-fluorouridine-3'-phosphate
  modified_base 17: mod_base = OTHER; note = 2'-O-methylcytidine-3'-phosphate
  modified_base 18: mod_base = OTHER; note = 2'-O-methyladenosine-3'-phosphate
  modified_base 19: mod_base = OTHER; note = 2'-O-methyladenosine-3'-phosphate
  modified_base 20: mod_base = OTHER; note = 2'-O-methyluridine-3'-phosphate
  modified_base 21: mod_base = OTHER; note = 2'-O-methyladenosine-3'-phosphorothioate
  modified_base 22: mod_base = OTHER; note = 2'-O-methyladenosine-3'-phosphorothioate
  modified_base 23: mod_base = OTHER; note = 2'-O-methylguanosine
aagtagaaggagtattcaataag

SEQ ID NO: 1200 - RNA, 23 nt, synthetic construct
  source 1..23: mol_type = other RNA
  modified_base 1: mod_base = OTHER; note = 2'-O-methyladenosine-3'-phosphorothioate
  modified_base 2: mod_base = OTHER; note = 2'-deoxy-2'-fluoroadenosine-3'-phosphorothioate
  modified_base 3: mod_base = OTHER; note = 2'-O-methylcytidine-3'-phosphate
  modified_base 4: mod_base = OTHER; note = 2'-O-methyluridine-3'-phosphate
  modified_base 5: mod_base = OTHER; note = 2'-O-methylcytidine-3'-phosphate
  modified_base 6: mod_base = OTHER; note = 2'-deoxy-2'-fluoroadenosine-3'-phosphate
  modified_base 7: mod_base = OTHER; note = 2'-O-methyluridine-3'-phosphate
  modified_base 8: mod_base = OTHER; note = 2'-deoxy-2'-fluorocytidine-3'-phosphate
  modified_base 9: mod_base = OTHER; note = 2'-deoxy-2'-fluoroadenosine-3'-phosphate
  modified_base 10: mod_base = OTHER; note = 2'-O-methylguanosine-3'-phosphate
  modified_base 11: mod_base = OTHER; note = 2'-O-methyladenosine-3'-phosphate
  modified_base 12: mod_base = OTHER; note = 2'-O-methylguanosine-3'-phosphate
  modified_base 13: mod_base = OTHER; note = 2'-O-methyluridine-3'-phosphate
  modified_base 14: mod_base = OTHER; note = 2'-deoxy-2'-fluoroadenosine-3'-phosphate
  modified_base 15: mod_base = OTHER; note = 2'-O-methylguanosine-3'-phosphate
  modified_base 16: mod_base = OTHER; note = 2'-deoxy-2'-fluoroadenosine-3'-phosphate
  modified_base 17: mod_base = OTHER; note = 2'-O-methyladenosine-3'-phosphate
  modified_base 18: mod_base = OTHER; note = 2'-O-methylguanosine-3'-phosphate
  modified_base 19: mod_base = OTHER; note = 2'-O-methylguanosine-3'-phosphate
  modified_base 20: mod_base = OTHER; note = 2'-O-methyladenosine-3'-phosphate
  modified_base 21: mod_base = OTHER; note = 2'-O-methylguanosine-3'-phosphorothioate
  modified_base 22: mod_base = OTHER; note = 2'-O-methyluridine-3'-phosphorothioate
  modified_base 23: mod_base = OTHER; note = 2'-O-methyladenosine
aactcatcagagtagaaggagta

SEQ ID NO: 1201 - RNA, 23 nt, synthetic construct
  source 1..23: mol_type = other RNA
  modified_base 1: mod_base = OTHER; note = 2'-O-methyladenosine-3'-phosphorothioate
  modified_base 2: mod_base = OTHER; note = 2'-deoxy-2'-fluoroguanosine-3'-phosphorothioate
  modified_base 3: mod_base = OTHER; note = 2'-O-methyluridine-3'-phosphate
  modified_base 4: mod_base = OTHER; note = 2'-O-methyladenosine-3'-phosphate
  modified_base 5: mod_base = OTHER; note = 2'-O-methylcytidine-3'-phosphate
  modified_base 6: mod_base = OTHER; note = 2'-deoxy-2'-fluorouridine-3'-phosphate
  modified_base 7: mod_base = OTHER; note = 2'-O-methylguanosine-3'-phosphate
  modified_base 8: mod_base = OTHER; note = 2'-deoxy-2'-fluorocytidine-3'-phosphate
  modified_base 9: mod_base = OTHER; note = 2'-deoxy-2'-fluoroadenosine-3'-phosphate
  modified_base 10: mod_base = OTHER; note = 2'-O-methylguanosine-3'-phosphate
  modified_base 11: mod_base = OTHER; note = 2'-O-methyluridine-3'-phosphate
  modified_base 12: mod_base = OTHER; note = 2'-O-methylguanosine-3'-phosphate
  modified_base 13: mod_base = OTHER; note = 2'-O-methyladenosine-3'-phosphate
  modified_base 14: mod_base = OTHER; note = 2'-deoxy-2'-fluorocytidine-3'-phosphate
  modified_base 15: mod_base = OTHER; note = 2'-O-methyluridine-3'-phosphate
  modified_base 16: mod_base = OTHER; note = 2'-deoxy-2'-fluorocytidine-3'-phosphate
  modified_base 17: mod_base = OTHER; note = 2'-O-methyladenosine-3'-phosphate
  modified_base 18: mod_base = OTHER; note = 2'-O-methyluridine-3'-phosphate
  modified_base 19: mod_base = OTHER; note = 2'-O-methylcytidine-3'-phosphate
  modified_base 20: mod_base = OTHER; note = 2'-O-methyladenosine-3'-phosphate
  modified_base 21: mod_base = OTHER; note = 2'-O-methylguanosine-3'-phosphorothioate
  modified_base 22: mod_base = OTHER; note = 2'-O-methyladenosine-3'-phosphorothioate
  modified_base 23: mod_base = OTHER; note = 2'-O-methylguanosine
agtactgcagtgactcatcagag

SEQ ID NO: 1202 - RNA, 23 nt, synthetic construct
  source 1..23: mol_type = other RNA
  modified_base 1: mod_base = OTHER; note = 2'-O-methyladenosine-3'-phosphorothioate
  modified_base 2: mod_base = OTHER; note = 2'-deoxy-2'-fluoroguanosine-3'-phosphorothioate
  modified_base 3: mod_base = OTHER; note = 2'-O-methyluridine-3'-phosphate
  modified_base 4: mod_base = OTHER; note = 2'-O-methylcytidine-3'-phosphate
  modified_base 5: mod_base = OTHER; note = 2'-O-methyluridine-3'-phosphate
  modified_base 6: mod_base = OTHER; note = 2'-deoxy-2'-fluorouridine-3'-phosphate
  modified_base 7: mod_base = OTHER; note = 2'-O-methyluridine-3'-phosphate
  modified_base 8: mod_base = OTHER; note = 2'-deoxy-2'-fluoroguanosine-3'-phosphate
  modified_base 9: mod_base = OTHER; note = 2'-deoxy-2'-fluoroguanosine-3'-phosphate
  modified_base 10: mod_base = OTHER; note = 2'-O-methylguanosine-3'-phosphate
  modified_base 11: mod_base = OTHER; note = 2'-O-methyluridine-3'-phosphate
  modified_base 12: mod_base = OTHER; note = 2'-O-methyladenosine-3'-phosphate
  modified_base 13: mod_base = OTHER; note = 2'-O-methylcytidine-3'-phosphate
  modified_base 14: mod_base = OTHER; note = 2'-deoxy-2'-fluorouridine-3'-phosphate
  modified_base 15: mod_base = OTHER; note = 2'-O-methylguanosine-3'-phosphate
  modified_base 16: mod_base = OTHER; note = 2'-deoxy-2'-fluorocytidine-3'-phosphate
  modified_base 17: mod_base = OTHER; note = 2'-O-methyladenosine-3'-phosphate
  modified_base 18: mod_base = OTHER; note = 2'-O-methylguanosine-3'-phosphate
  modified_base 19: mod_base = OTHER; note = 2'-O-methyluridine-3'-phosphate
  modified_base 20: mod_base = OTHER; note = 2'-O-methylguanosine-3'-phosphate
  modified_base 21: mod_base = OTHER; note = 2'-O-methyladenosine-3'-phosphorothioate
  modified_base 22: mod_base = OTHER; note = 2'-O-methylcytidine-3'-phosphorothioate
  modified_base 23: mod_base = OTHER; note = 2'-O-methyluridine
agtctttgggtactgcagtgact

SEQ ID NO: 1203 - RNA, 23 nt, synthetic construct
  source 1..23: mol_type = other RNA
  modified_base 1: mod_base = OTHER; note = 2'-O-methyladenosine-3'-phosphorothioate
  modified_base 2: mod_base = OTHER; note = 2'-deoxy-2'-fluorocytidine-3'-phosphorothioate
  modified_base 3: mod_base = OTHER; note = 2'-O-methylcytidine-3'-phosphate
  modified_base 4: mod_base = OTHER; note = 2'-O-methylguanosine-3'-phosphate
  modified_base 5: mod_base = OTHER; note = 2'-O-methyluridine-3'-phosphate
  modified_base 6: mod_base = OTHER; note = 2'-deoxy-2'-fluoroadenosine-3'-phosphate
  modified_base 7: mod_base = OTHER; note = 2'-O-methylcytidine-3'-phosphate
  modified_base 8: mod_base = OTHER; note = 2'-deoxy-2'-fluoroadenosine-3'-phosphate
  modified_base 9: mod_base = OTHER; note = 2'-deoxy-2'-fluoroguanosine-3'-phosphate
  modified_base 10: mod_base = OTHER; note = 2'-O-methyluridine-3'-phosphate
  modified_base 11: mod_base = OTHER; note = 2'-O-methylcytidine-3'-phosphate
  modified_base 12: mod_base = OTHER; note = 2'-O-methyluridine-3'-phosphate
  modified_base 13: mod_base = OTHER; note = 2'-O-methyluridine-3'-phosphate
  modified_base 14: mod_base = OTHER; note = 2'-deoxy-2'-fluorouridine-3'-phosphate
  modified_base 15: mod_base = OTHER; note = 2'-O-methylguanosine-3'-phosphate
  modified_base 16: mod_base = OTHER; note = 2'-deoxy-2'-fluoroguanosine-3'-phosphate
  modified_base 17: mod_base = OTHER; note = 2'-O-methylguanosine-3'-phosphate
  modified_base 18: mod_base = OTHER; note = 2'-O-methyluridine-3'-phosphate
  modified_base 19: mod_base = OTHER; note = 2'-O-methyladenosine-3'-phosphate
  modified_base 20: mod_base = OTHER; note = 2'-O-methylcytidine-3'-phosphate
  modified_base 21: mod_base = OTHER; note = 2'-O-methyluridine-3'-phosphorothioate
  modified_base 22: mod_base = OTHER; note = 2'-O-methylguanosine-3'-phosphorothioate
  modified_base 23: mod_base = OTHER; note = 2'-O-methylcytidine
accgtacagtctttgggtactgc

SEQ ID NO: 1204 - RNA, 23 nt, synthetic construct
  source 1..23: mol_type = other RNA
  modified_base 1: mod_base = OTHER; note = 2'-O-methyladenosine-3'-phosphorothioate
  modified_base 2: mod_base = OTHER; note = 2'-deoxy-2'-fluoroadenosine-3'-phosphorothioate
  modified_base 3: mod_base = OTHER; note = 2'-O-methyluridine-3'-phosphate
  modified_base 4: mod_base = OTHER; note = 2'-O-methyladenosine-3'-phosphate
  modified_base 5: mod_base = OTHER; note = 2'-O-methyluridine-3'-phosphate
  modified_base 6: mod_base = OTHER; note = 2'-deoxy-2'-fluoroguanosine-3'-phosphate
  modified_base 7: mod_base = OTHER; note = 2'-O-methylguanosine-3'-phosphate
  modified_base 8: mod_base = OTHER; note = 2'-deoxy-2'-fluoroadenosine-3'-phosphate
  modified_base 9: mod_base = OTHER; note = 2'-deoxy-2'-fluoroadenosine-3'-phosphate
  modified_base 10: mod_base = OTHER; note = 2'-O-methylcytidine-3'-phosphate
  modified_base 11: mod_base = OTHER; note = 2'-O-methylcytidine-3'-phosphate
  modified_base 12: mod_base = OTHER; note = 2'-O-methylcytidine-3'-phosphate
  modified_base 13: mod_base = OTHER; note = 2'-O-methylguanosine-3'-phosphate
  modified_base 14: mod_base = OTHER; note = 2'-deoxy-2'-fluorouridine-3'-phosphate
  modified_base 15: mod_base = OTHER; note = 2'-O-methyladenosine-3'-phosphate
  modified_base 16: mod_base = OTHER; note = 2'-deoxy-2'-fluorocytidine-3'-phosphate
  modified_base 17: mod_base = OTHER; note = 2'-O-methyladenosine-3'-phosphate
  modified_base 18: mod_base = OTHER; note = 2'-O-methylguanosine-3'-phosphate
  modified_base 19: mod_base = OTHER; note = 2'-O-methyluridine-3'-phosphate
  modified_base 20: mod_base = OTHER; note = 2'-O-methylcytidine-3'-phosphate
  modified_base 21: mod_base = OTHER; note = 2'-O-methyluridine-3'-phosphorothioate
  modified_base 22: mod_base = OTHER; note = 2'-O-methyluridine-3'-phosphorothioate
  modified_base 23: mod_base = OTHER; note = 2'-O-methyluridine
aatatggaacccgtacagtcttt

SEQ ID NO: 1205 - RNA, 23 nt, synthetic construct
  source 1..23: mol_type = other RNA
  modified_base 1: mod_base = OTHER; note = 2'-O-methyladenosine-3'-phosphorothioate
  modified_base 2: mod_base = OTHER; note = 2'-deoxy-2'-fluorouridine-3'-phosphorothioate
  modified_base 3: mod_base = OTHER; note = 2'-O-methylguanosine-3'-phosphate
  modified_base 4: mod_base = OTHER; note = 2'-O-methylcytidine-3'-phosphate
  modified_base 5: mod_base = OTHER; note = 2'-O-methylcytidine-3'-phosphate
  modified_base 6: mod_base = OTHER; note = 2'-deoxy-2'-fluorouridine-3'-phosphate
  modified_base 7: mod_base = OTHER; note = 2'-O-methyluridine-3'-phosphate
  modified_base 8: mod_base = OTHER; note = 2'-deoxy-2'-fluorouridine-3'-phosphate
  modified_base 9: mod_base = OTHER; note = 2'-deoxy-2'-fluoroguanosine-3'-phosphate
  modified_base 10: mod_base = OTHER; note = 2'-O-methylguanosine-3'-phosphate
  modified_base 11: mod_base = OTHER; note = 2'-O-methyladenosine-3'-phosphate
  modified_base 12: mod_base = OTHER; note = 2'-O-methyluridine-3'-phosphate
  modified_base 13: mod_base = OTHER; note = 2'-O-methyladenosine-3'-phosphate
  modified_base 14: mod_base = OTHER; note = 2'-deoxy-2'-fluorouridine-3'-phosphate
  modified_base 15: mod_base = OTHER; note = 2'-O-methylguanosine-3'-phosphate
  modified_base 16: mod_base = OTHER; note = 2'-deoxy-2'-fluoroguanosine-3'-phosphate
  modified_base 17: mod_base = OTHER; note = 2'-O-methyladenosine-3'-phosphate
  modified_base 18: mod_base = OTHER; note = 2'-O-methyladenosine-3'-phosphate
  modified_base 19: mod_base = OTHER; note = 2'-O-methylcytidine-3'-phosphate
  modified_base 20: mod_base = OTHER; note = 2'-O-methylcytidine-3'-phosphate
  modified_base 21: mod_base = OTHER; note = 2'-O-methylcytidine-3'-phosphorothioate
  modified_base 22: mod_base = OTHER; note = 2'-O-methylguanosine-3'-phosphorothioate
  modified_base 23: mod_base = OTHER; note = 2'-O-methyluridine
atgcctttggatatggaacccgt

SEQ ID NO: 1206 - RNA, 23 nt, synthetic construct
  source 1..23: mol_type = other RNA
  modified_base 1: mod_base = OTHER; note = 2'-O-methyladenosine-3'-phosphorothioate
  modified_base 2: mod_base = OTHER; note = 2'-deoxy-2'-fluoroadenosine-3'-phosphorothioate
  modified_base 3: mod_base = OTHER; note = 2'-O-methylcytidine-3'-phosphate
  modified_base 4: mod_base = OTHER; note = 2'-O-methyladenosine-3'-phosphate
  modified_base 5: mod_base = OTHER; note = 2'-O-methylguanosine-3'-phosphate
  modified_base 6: mod_base = OTHER; note = 2'-deoxy-2'-fluorouridine-3'-phosphate
  modified_base 7: mod_base = OTHER; note = 2'-O-methyluridine-3'-phosphate
  modified_base 8: mod_base = OTHER; note = 2'-deoxy-2'-fluoroguanosine-3'-phosphate
  modified_base 9: mod_base = OTHER; note = 2'-deoxy-2'-fluoroguanosine-3'-phosphate
  modified_base 10: mod_base = OTHER; note = 2'-O-methyladenosine-3'-phosphate
  modified_base 11: mod_base = OTHER; note = 2'-O-methyluridine-3'-phosphate
  modified_base 12: mod_base = OTHER; note = 2'-O-methyluridine-3'-phosphate
  modified_base 13: mod_base = OTHER; note = 2'-O-methylcytidine-3'-phosphate
  modified_base 14: mod_base = OTHER; note = 2'-deoxy-2'-fluoroadenosine-3'-phosphate
  modified_base 15: mod_base = OTHER; note = 2'-O-methylcytidine-3'-phosphate
  modified_base 16: mod_base = OTHER; note = 2'-deoxy-2'-fluoroadenosine-3'-phosphate
  modified_base 17: mod_base = OTHER; note = 2'-O-methylguanosine-3'-phosphate
  modified_base 18: mod_base = OTHER; note = 2'-O-methylcytidine-3'-phosphate
  modified_base 19: mod_base = OTHER; note = 2'-O-methyluridine-3'-phosphate
  modified_base 20: mod_base = OTHER; note = 2'-O-methylcytidine-3'-phosphate
  modified_base 21: mod_base = OTHER; note = 2'-O-methylcytidine-3'-phosphorothioate
  modified_base 22: mod_base = OTHER; note = 2'-O-methyluridine-3'-phosphorothioate
  modified_base 23: mod_base = OTHER; note = 2'-O-methylguanosine
aacagttggattcacagctcctg

SEQ ID NO: 1207 - RNA, 23 nt, synthetic construct
  source 1..23: mol_type = other RNA
  modified_base 1: mod_base = OTHER; note = 2'-O-methyladenosine-3'-phosphorothioate
  modified_base 2: mod_base = OTHER; note = 2'-deoxy-2'-fluoroadenosine-3'-phosphorothioate
  modified_base 3: mod_base = OTHER; note = 2'-O-methyladenosine-3'-phosphate
  modified_base 4: mod_base = OTHER; note = 2'-O-methylcytidine-3'-phosphate
  modified_base 5: mod_base = OTHER; note = 2'-O-methyluridine-3'-phosphate
  modified_base 6: mod_base = OTHER; note = 2'-deoxy-2'-fluorouridine-3'-phosphate
  modified_base 7: mod_base = OTHER; note = 2'-O-methyluridine-3'-phosphate
  modified_base 8: mod_base = OTHER; note = 2'-deoxy-2'-fluoroadenosine-3'-phosphate
  modified_base 9: mod_base = OTHER; note = 2'-deoxy-2'-fluorocytidine-3'-phosphate
  modified_base 10: mod_base = OTHER; note = 2'-O-methyladenosine-3'-phosphate
  modified_base 11: mod_base = OTHER; note = 2'-O-methylguanosine-3'-phosphate
  modified_base 12: mod_base = OTHER; note = 2'-O-methyluridine-3'-phosphate
  modified_base 13: mod_base = OTHER; note = 2'-O-methyluridine-3'-phosphate
  modified_base 14: mod_base = OTHER; note = 2'-deoxy-2'-fluoroguanosine-3'-phosphate
  modified_base 15: mod_base = OTHER; note = 2'-O-methylguanosine-3'-phosphate
  modified_base 16: mod_base = OTHER; note = 2'-deoxy-2'-fluoroadenosine-3'-phosphate
  modified_base 17: mod_base = OTHER; note = 2'-O-methyluridine-3'-phosphate
  modified_base 18: mod_base = OTHER; note = 2'-O-methyluridine-3'-phosphate
  modified_base 19: mod_base = OTHER; note = 2'-O-methylcytidine-3'-phosphate
  modified_base 20: mod_base = OTHER; note = 2'-O-methyladenosine-3'-phosphate
  modified_base 21: mod_base = OTHER; note = 2'-O-methylcytidine-3'-phosphorothioate
  modified_base 22: mod_base = OTHER; note = 2'-O-methyladenosine-3'-phosphorothioate
  modified_base 23: mod_base = OTHER; note = 2'-O-methylguanosine
aaactttacagttggattcacag

SEQ ID NO: 1208 - RNA, 23 nt, synthetic construct
  source 1..23: mol_type = other RNA
  modified_base 1: mod_base = OTHER; note = 2'-O-methyladenosine-3'-phosphorothioate
  modified_base 2: mod_base = OTHER; note = 2'-deoxy-2'-fluoroadenosine-3'-phosphorothioate
  modified_base 3: mod_base = OTHER; note = 2'-O-methyladenosine-3'-phosphate
  modified_base 4: mod_base = OTHER; note = 2'-O-methylcytidine-3'-phosphate
  modified_base 5: mod_base = OTHER; note = 2'-O-methyladenosine-3'-phosphate
  modified_base 6: mod_base = OTHER; note = 2'-deoxy-2'-fluoroadenosine-3'-phosphate
  modified_base 7: mod_base = OTHER; note = 2'-O-methyladenosine-3'-phosphate
  modified_base 8: mod_base = OTHER; note = 2'-deoxy-2'-fluoroguanosine-3'-phosphate
  modified_base 9: mod_base = OTHER; note = 2'-deoxy-2'-fluoroadenosine-3'-phosphate
  modified_base 10: mod_base = OTHER; note = 2'-O-methyladenosine-3'-phosphate
  modified_base 11: mod_base = OTHER; note = 2'-O-methylcytidine-3'-phosphate
  modified_base 12: mod_base = OTHER; note = 2'-O-methyluridine-3'-phosphate
  modified_base 13: mod_base = OTHER; note = 2'-O-methyluridine-3'-phosphate
  modified_base 14: mod_base = OTHER; note = 2'-deoxy-2'-fluorouridine-3'-phosphate
  modified_base 15: mod_base = OTHER; note = 2'-O-methyladenosine-3'-phosphate
  modified_base 16: mod_base = OTHER; note = 2'-deoxy-2'-fluorocytidine-3'-phosphate
  modified_base 17: mod_base = OTHER; note = 2'-O-methyladenosine-3'-phosphate
  modified_base 18: mod_base = OTHER; note = 2'-O-methylguanosine-3'-phosphate
  modified_base 19: mod_base = OTHER; note = 2'-O-methyluridine-3'-phosphate
  modified_base 20: mod_base = OTHER; note = 2'-O-methyluridine-3'-phosphate
  modified_base 21: mod_base = OTHER; note = 2'-O-methylguanosine-3'-phosphorothioate
  modified_base 22: mod_base = OTHER; note = 2'-O-methylguanosine-3'-phosphorothioate
  modified_base 23: mod_base = OTHER; note = 2'-O-methyladenosine
aaacaaagaactttacagttgga

SEQ ID NO: 1209 - RNA, 23 nt, synthetic construct
  source 1..23: mol_type = other RNA
  modified_base 1: mod_base = OTHER; note = 2'-O-methyladenosine-3'-phosphorothioate
  modified_base 2: mod_base = OTHER; note = 2'-deoxy-2'-fluorouridine-3'-phosphorothioate
  modified_base 3: mod_base = OTHER; note = 2'-O-methylcytidine-3'-phosphate
  modified_base 4: mod_base = OTHER; note = 2'-O-methyluridine-3'-phosphate
  modified_base 5: mod_base = OTHER; note = 2'-O-methylguanosine-3'-phosphate
  modified_base 6: mod_base = OTHER; note = 2'-deoxy-2'-fluorouridine-3'-phosphate
  modified_base 7: mod_base = OTHER; note = 2'-O-methyladenosine-3'-phosphate
  modified_base 8: mod_base = OTHER; note = 2'-deoxy-2'-fluorouridine-3'-phosphate
  modified_base 9: mod_base = OTHER; note = 2'-deoxy-2'-fluorouridine-3'-phosphate
  modified_base 10: mod_base = OTHER; note = 2'-O-methyluridine-3'-phosphate
  modified_base 11: mod_base = OTHER; note = 2'-O-methyladenosine-3'-phosphate
  modified_base 12: mod_base = OTHER; note = 2'-O-methylcytidine-3'-phosphate
  modified_base 13: mod_base = OTHER; note = 2'-O-methyladenosine-3'-phosphate
  modified_base 14: mod_base = OTHER; note = 2'-deoxy-2'-fluoroadenosine-3'-phosphate
  modified_base 15: mod_base = OTHER; note = 2'-O-methylcytidine-3'-phosphate
  modified_base 16: mod_base = OTHER; note = 2'-deoxy-2'-fluoroadenosine-3'-phosphate
  modified_base 17: mod_base = OTHER; note = 2'-O-methyladenosine-3'-phosphate
  modified_base 18: mod_base = OTHER; note = 2'-O-methyladenosine-3'-phosphate
  modified_base 19: mod_base = OTHER; note = 2'-O-methylguanosine-3'-phosphate
  modified_base 20: mod_base = OTHER; note = 2'-O-methyladenosine-3'-phosphate
  modified_base 21: mod_base = OTHER; note = 2'-O-methyladenosine-3'-phosphorothioate
  modified_base 22: mod_base = OTHER; note = 2'-O-methylcytidine-3'-phosphorothioate
  modified_base 23: mod_base = OTHER; note = 2'-O-methyluridine
atctgtatttacaacaaagaact

SEQ ID NO: 1210 - RNA, 23 nt, synthetic construct
  source 1..23: mol_type = other RNA
  modified_base 1: mod_base = OTHER; note = 2'-O-methyladenosine-3'-phosphorothioate
  modified_base 2: mod_base = OTHER; note = 2'-deoxy-2'-fluoroadenosine-3'-phosphorothioate
  modified_base 3: mod_base = OTHER; note = 2'-O-methylguanosine-3'-phosphate
  modified_base 4: mod_base = OTHER; note = 2'-O-methyladenosine-3'-phosphate
  modified_base 5: mod_base = OTHER; note = 2'-O-methylguanosine-3'-phosphate
  modified_base 6: mod_base = OTHER; note = 2'-deoxy-2'-fluoroadenosine-3'-phosphate
  modified_base 7: mod_base = OTHER; note = 2'-O-methylguanosine-3'-phosphate
  modified_base 8: mod_base = OTHER; note = 2'-deoxy-2'-fluorouridine-3'-phosphate
  modified_base 9: mod_base = OTHER; note = 2'-deoxy-2'-fluorocytidine-3'-phosphate
  modified_base 10: mod_base = OTHER; note = 2'-O-methyluridine-3'-phosphate
  modified_base 11: mod_base = OTHER; note = 2'-O-methylguanosine-3'-phosphate
  modified_base 12: mod_base = OTHER; note = 2'-O-methyluridine-3'-phosphate
  modified_base 13: mod_base = OTHER; note = 2'-O-methyladenosine-3'-phosphate
  modified_base 14: mod_base = OTHER; note = 2'-deoxy-2'-fluorouridine-3'-phosphate
  modified_base 15: mod_base = OTHER; note = 2'-O-methyluridine-3'-phosphate
  modified_base 16: mod_base = OTHER; note = 2'-deoxy-2'-fluorouridine-3'-phosphate
  modified_base 17: mod_base = OTHER; note = 2'-O-methyladenosine-3'-phosphate
  modified_base 18: mod_base = OTHER; note = 2'-O-methylcytidine-3'-phosphate
  modified_base 19: mod_base = OTHER; note = 2'-O-methyladenosine-3'-phosphate
  modified_base 20: mod_base = OTHER; note = 2'-O-methyladenosine-3'-phosphate
  modified_base 21: mod_base = OTHER; note = 2'-O-methylcytidine-3'-phosphorothioate
  modified_base 22: mod_base = OTHER; note = 2'-O-methyladenosine-3'-phosphorothioate
  modified_base 23: mod_base = OTHER; note = 2'-O-methyladenosine
aagagagtctgtatttacaacaa

SEQ ID NO: 1211 - RNA, 23 nt, synthetic construct
  source 1..23: mol_type = other RNA
  modified_base 1: mod_base = OTHER; note = 2'-O-methyladenosine-3'-phosphorothioate
  modified_base 2: mod_base = OTHER; note = 2'-deoxy-2'-fluorouridine-3'-phosphorothioate
  modified_base 3: mod_base = OTHER; note = 2'-O-methylguanosine-3'-phosphate
  modified_base 4: mod_base = OTHER; note = 2'-O-methyladenosine-3'-phosphate
  modified_base 5: mod_base = OTHER; note = 2'-O-methylcytidine-3'-phosphate
  modified_base 6: mod_base = OTHER; note = 2'-deoxy-2'-fluorouridine-3'-phosphate
  modified_base 7: mod_base = OTHER; note = 2'-O-methylguanosine-3'-phosphate
  modified_base 8: mod_base = OTHER; note = 2'-deoxy-2'-fluoroadenosine-3'-phosphate
  modified_base 9: mod_base = OTHER; note = 2'-deoxy-2'-fluoroguanosine-3'-phosphate
  modified_base 10: mod_base = OTHER; note = 2'-O-methylcytidine-3'-phosphate
  modified_base 11: mod_base = OTHER; note = 2'-O-methyluridine-3'-phosphate
  modified_base 12: mod_base = OTHER; note = 2'-O-methylguanosine-3'-phosphate
  modified_base 13: mod_base = OTHER; note = 2'-O-methyladenosine-3'-phosphate
  modified_base 14: mod_base = OTHER; note = 2'-deoxy-2'-fluoroguanosine-3'-phosphate
  modified_base 15: mod_base = OTHER; note = 2'-O-methyladenosine-3'-phosphate
  modified_base 16: mod_base = OTHER; note = 2'-deoxy-2'-fluoroguanosine-3'-phosphate
  modified_base 17: mod_base = OTHER; note = 2'-O-methyladenosine-3'-phosphate
  modified_base 18: mod_base = OTHER; note = 2'-O-methylguanosine-3'-phosphate
  modified_base 19: mod_base = OTHER; note = 2'-O-methyluridine-3'-phosphate
  modified_base 20: mod_base = OTHER; note = 2'-O-methylcytidine-3'-phosphate
  modified_base 21: mod_base = OTHER; note = 2'-O-methyluridine-3'-phosphorothioate
  modified_base 22: mod_base = OTHER; note = 2'-O-methylguanosine-3'-phosphorothioate
  modified_base 23: mod_base = OTHER; note = 2'-O-methyluridine
atgactgagctgagagagtctgt

SEQ ID NO: 1212 - RNA, 23 nt, synthetic construct
  source 1..23: mol_type = other RNA
  modified_base 1: mod_base = OTHER; note = 2'-O-methyladenosine-3'-phosphorothioate
  modified_base 2: mod_base = OTHER; note = 2'-deoxy-2'-fluorocytidine-3'-phosphorothioate
  modified_base 3: mod_base = OTHER; note = 2'-O-methyladenosine-3'-phosphate
  modified_base 4: mod_base = OTHER; note = 2'-O-methyluridine-3'-phosphate
  modified_base 5: mod_base = OTHER; note = 2'-O-methyluridine-3'-phosphate
  modified_base 6: mod_base = OTHER; note = 2'-deoxy-2'-fluoroguanosine-3'-phosphate
  modified_base 7: mod_base = OTHER; note = 2'-O-methylguanosine-3'-phosphate
  modified_base 8: mod_base = OTHER; note = 2'-deoxy-2'-fluorouridine-3'-phosphate
  modified_base 9: mod_base = OTHER; note = 2'-deoxy-2'-fluoroguanosine-3'-phosphate
  modified_base 10: mod_base = OTHER; note = 2'-O-methyladenosine-3'-phosphate
  modified_base 11: mod_base = OTHER; note = 2'-O-methylcytidine-3'-phosphate
  modified_base 12: mod_base = OTHER; note = 2'-O-methyluridine-3'-phosphate
  modified_base 13: mod_base = OTHER; note = 2'-O-methylguanosine-3'-phosphate
  modified_base 14: mod_base = OTHER; note = 2'-deoxy-2'-fluoroadenosine-3'-phosphate
  modified_base 15: mod_base = OTHER; note = 2'-O-methylguanosine-3'-phosphate
  modified_base 16: mod_base = OTHER; note = 2'-deoxy-2'-fluorocytidine-3'-phosphate
  modified_base 17: mod_base = OTHER; note = 2'-O-methyluridine-3'-phosphate
  modified_base 18: mod_base = OTHER; note = 2'-O-methylguanosine-3'-phosphate
  modified_base 19: mod_base = OTHER; note = 2'-O-methyladenosine-3'-phosphate
  modified_base 20: mod_base = OTHER; note = 2'-O-methylguanosine-3'-phosphate
  modified_base 21: mod_base = OTHER; note = 2'-O-methyladenosine-3'-phosphorothioate
  modified_base 22: mod_base = OTHER; note = 2'-O-methylguanosine-3'-phosphorothioate
  modified_base 23: mod_base = OTHER; note = 2'-O-methyladenosine
acattggtgactgagctgagaga

SEQ ID NO: 1213 - RNA, 23 nt, synthetic construct
  source 1..23: mol_type = other RNA
  modified_base 1: mod_base = OTHER; note = 2'-O-methyladenosine-3'-phosphorothioate
  modified_base 2: mod_base = OTHER; note = 2'-deoxy-2'-fluoroguanosine-3'-phosphorothioate
  modified_base 3: mod_base = OTHER; note = 2'-O-methyladenosine-3'-phosphate
  modified_base 4: mod_base = OTHER; note = 2'-O-methyladenosine-3'-phosphate
  modified_base 5: mod_base = OTHER; note = 2'-O-methylguanosine-3'-phosphate
  modified_base 6: mod_base = OTHER; note = 2'-deoxy-2'-fluorouridine-3'-phosphate
  modified_base 7: mod_base = OTHER; note = 2'-O-methyluridine-3'-phosphate
  modified_base 8: mod_base = OTHER; note = 2'-deoxy-2'-fluoroguanosine-3'-phosphate
  modified_base 9: mod_base = OTHER; note = 2'-deoxy-2'-fluorocytidine-3'-phosphate
  modified_base 10: mod_base = OTHER; note = 2'-O-methyladenosine-3'-phosphate
  modified_base 11: mod_base = OTHER; note = 2'-O-methyluridine-3'-phosphate
  modified_base 12: mod_base = OTHER; note = 2'-O-methyluridine-3'-phosphate
  modified_base 13: mod_base = OTHER; note = 2'-O-methylguanosine-3'-phosphate
  modified_base 14: mod_base = OTHER; note = 2'-deoxy-2'-fluoroguanosine-3'-phosphate
  modified_base 15: mod_base = OTHER; note = 2'-O-methyluridine-3'-phosphate
  modified_base 16: mod_base = OTHER; note = 2'-deoxy-2'-fluoroguanosine-3'-phosphate
  modified_base 17: mod_base = OTHER; note = 2'-O-methyladenosine-3'-phosphate
  modified_base 18: mod_base = OTHER; note = 2'-O-methylcytidine-3'-phosphate
  modified_base 19: mod_base = OTHER; note = 2'-O-methyluridine-3'-phosphate
  modified_base 20: mod_base = OTHER; note = 2'-O-methylguanosine-3'-phosphate
  modified_base 21: mod_base = OTHER; note = 2'-O-methyladenosine-3'-phosphorothioate
  modified_base 22: mod_base = OTHER; note = 2'-O-methylguanosine-3'-phosphorothioate
  modified_base 23: mod_base = OTHER; note = 2'-O-methylcytidine
agaagttgcattggtgactgagc

SEQ ID NO: 1214 - RNA, 23 nt, synthetic construct
  source 1..23: mol_type = other RNA
  modified_base 1: mod_base = OTHER; note = 2'-O-methyladenosine-3'-phosphorothioate
  modified_base 2: mod_base = OTHER; note = 2'-deoxy-2'-fluorouridine-3'-phosphorothioate
  modified_base 3: mod_base = OTHER; note = 2'-O-methyluridine-3'-phosphate
  modified_base 4: mod_base = OTHER; note = 2'-O-methylguanosine-3'-phosphate
  modified_base 5: mod_base = OTHER; note = 2'-O-methyluridine-3'-phosphate
  modified_base 6: mod_base = OTHER; note = 2'-deoxy-2'-fluoroadenosine-3'-phosphate
  modified_base 7: mod_base = OTHER; note = 2'-O-methyluridine-3'-phosphate
  modified_base 8: mod_base = OTHER; note = 2'-deoxy-2'-fluoroguanosine-3'-phosphate
  modified_base 9: mod_base = OTHER; note = 2'-deoxy-2'-fluoroguanosine-3'-phosphate
  modified_base 10: mod_base = OTHER; note = 2'-O-methyladenosine-3'-phosphate
  modified_base 11: mod_base = OTHER; note = 2'-O-methyladenosine-3'-phosphate
  modified_base 12: mod_base = OTHER; note = 2'-O-methylguanosine-3'-phosphate
  modified_base 13: mod_base = OTHER; note = 2'-O-methyluridine-3'-phosphate
  modified_base 14: mod_base = OTHER; note = 2'-deoxy-2'-fluorouridine-3'-phosphate
  modified_base 15: mod_base = OTHER; note = 2'-O-methylguanosine-3'-phosphate
  modified_base 16: mod_base = OTHER; note = 2'-deoxy-2'-fluorocytidine-3'-phosphate
  modified_base 17: mod_base = OTHER; note = 2'-O-methyladenosine-3'-phosphate
  modified_base 18: mod_base = OTHER; note = 2'-O-methyluridine-3'-phosphate
  modified_base 19: mod_base = OTHER; note = 2'-O-methyluridine-3'-phosphate
  modified_base 20: mod_base = OTHER; note = 2'-O-methylguanosine-3'-phosphate
  modified_base 21: mod_base = OTHER; note = 2'-O-methylguanosine-3'-phosphorothioate
  modified_base 22: mod_base = OTHER; note = 2'-O-methyluridine-3'-phosphorothioate
  modified_base 23: mod_base = OTHER; note = 2'-O-methylguanosine
attgtatggaagttgcattggtg

SEQ ID NO: 1215 - RNA, 23 nt, synthetic construct
  source 1..23: mol_type = other RNA
  modified_base 1: mod_base = OTHER; note = 2'-O-methyladenosine-3'-phosphorothioate
  modified_base 2: mod_base = OTHER; note = 2'-deoxy-2'-fluoroadenosine-3'-phosphorothioate
  modified_base 3: mod_base = OTHER; note = 2'-O-methylguanosine-3'-phosphate
  modified_base 4: mod_base = OTHER; note = 2'-O-methyluridine-3'-phosphate
  modified_base 5: mod_base = OTHER; note = 2'-O-methylguanosine-3'-phosphate
  modified_base 6: mod_base = OTHER; note = 2'-deoxy-2'-fluoroadenosine-3'-phosphate
  modified_base 7: mod_base = OTHER; note = 2'-O-methyluridine-3'-phosphate
  modified_base 8: mod_base = OTHER; note = 2'-deoxy-2'-fluorouridine-3'-phosphate
  modified_base 9: mod_base = OTHER; note = 2'-deoxy-2'-fluorouridine-3'-phosphate
  modified_base 10: mod_base = OTHER; note = 2'-O-methylguanosine-3'-phosphate
  modified_base 11: mod_base = OTHER; note = 2'-O-methyluridine-3'-phosphate
  modified_base 12: mod_base = OTHER; note = 2'-O-methyladenosine-3'-phosphate
  modified_base 13: mod_base = OTHER; note = 2'-O-methyluridine-3'-phosphate
  modified_base 14: mod_base = OTHER; note = 2'-deoxy-2'-fluoroguanosine-3'-phosphate
  modified_base 15: mod_base = OTHER; note = 2'-O-methylguanosine-3'-phosphate
  modified_base 16: mod_base = OTHER; note = 2'-deoxy-2'-fluoroadenosine-3'-phosphate
  modified_base 17: mod_base = OTHER; note = 2'-O-methyladenosine-3'-phosphate
  modified_base 18: mod_base = OTHER; note = 2'-O-methylguanosine-3'-phosphate
  modified_base 19: mod_base = OTHER; note = 2'-O-methyluridine-3'-phosphate
  modified_base 20: mod_base = OTHER; note = 2'-O-methyluridine-3'-phosphate
  modified_base 21: mod_base = OTHER; note = 2'-O-methylguanosine-3'-phosphorothioate
  modified_base 22: mod_base = OTHER; note = 2'-O-methylcytidine-3'-phosphorothioate
  modified_base 23: mod_base = OTHER; note = 2'-O-methyladenosine
aagtgatttgtatggaagttgca

SEQ ID NO: 1216 - RNA, 23 nt, synthetic construct
  source 1..23: mol_type = other RNA
  modified_base 1: mod_base = OTHER; note = 2'-O-methyladenosine-3'-phosphorothioate
  modified_base 2: mod_base = OTHER; note = 2'-deoxy-2'-fluoroadenosine-3'-phosphorothioate
  modified_base 3: mod_base = OTHER; note = 2'-O-methylguanosine-3'-phosphate
  modified_base 4: mod_base = OTHER; note = 2'-O-methylguanosine-3'-phosphate
  modified_base 5: mod_base = OTHER; note = 2'-O-methyladenosine-3'-phosphate
  modified_base 6: mod_base = OTHER; note = 2'-deoxy-2'-fluoroguanosine-3'-phosphate
  modified_base 7: mod_base = OTHER; note = 2'-O-methylcytidine-3'-phosphate
  modified_base 8: mod_base = OTHER; note = 2'-deoxy-2'-fluoroadenosine-3'-phosphate
  modified_base 9: mod_base = OTHER; note = 2'-deoxy-2'-fluoroguanosine-3'-phosphate
  modified_base 10: mod_base = OTHER; note = 2'-O-methyluridine-3'-phosphate
  modified_base 11: mod_base = OTHER; note = 2'-O-methylguanosine-3'-phosphate
  modified_base 12: mod_base = OTHER; note = 2'-O-methyladenosine-3'-phosphate
  modified_base 13: mod_base = OTHER; note = 2'-O-methyluridine-3'-phosphate
  modified_base 14: mod_base = OTHER; note = 2'-deoxy-2'-fluorouridine-3'-phosphate
  modified_base 15: mod_base = OTHER; note = 2'-O-methyluridine-3'-phosphate
  modified_base 16: mod_base = OTHER; note = 2'-deoxy-2'-fluoroguanosine-3'-phosphate
  modified_base 17: mod_base = OTHER; note = 2'-O-methyluridine-3'-phosphate
  modified_base 18: mod_base = OTHER; note = 2'-O-methyladenosine-3'-phosphate
  modified_base 19: mod_base = OTHER; note = 2'-O-methyluridine-3'-phosphate
  modified_base 20: mod_base = OTHER; note = 2'-O-methylguanosine-3'-phosphate
  modified_base 21: mod_base = OTHER; note = 2'-O-methylguanosine-3'-phosphorothioate
  modified_base 22: mod_base = OTHER; note = 2'-O-methyladenosine-3'-phosphorothioate
  modified_base 23: mod_base = OTHER; note = 2'-O-methyladenosine
aaggagcagtgatttgtatggaa

SEQ ID NO: 1217 - RNA, 23 nt, synthetic construct
  source 1..23: mol_type = other RNA
  modified_base 1: mod_base = OTHER; note = 2'-O-methyladenosine-3'-phosphorothioate
  modified_base 2: mod_base = OTHER; note = 2'-deoxy-2'-fluoroadenosine-3'-phosphorothioate
  modified_base 3: mod_base = OTHER; note = 2'-O-methyluridine-3'-phosphate
  modified_base 4: mod_base = OTHER; note = 2'-O-methyladenosine-3'-phosphate
  modified_base 5: mod_base = OTHER; note = 2'-O-methylguanosine-3'-phosphate
  modified_base 6: mod_base = OTHER; note = 2'-deoxy-2'-fluoroadenosine-3'-phosphate
  modified_base 7: mod_base = OTHER; note = 2'-O-methyladenosine-3'-phosphate
  modified_base 8: mod_base = OTHER; note = 2'-deoxy-2'-fluoroguanosine-3'-phosphate
  modified_base 9: mod_base = OTHER; note = 2'-deoxy-2'-fluorocytidine-3'-phosphate
  modified_base 10: mod_base = OTHER; note = 2'-O-methyladenosine-3'-phosphate
  modified_base 11: mod_base = OTHER; note = 2'-O-methylguanosine-3'-phosphate
  modified_base 12: mod_base = OTHER; note = 2'-O-methylguanosine-3'-phosphate
  modified_base 13: mod_base = OTHER; note = 2'-O-methyladenosine-3'-phosphate
  modified_base 14: mod_base = OTHER; note = 2'-deoxy-2'-fluoroguanosine-3'-phosphate
  modified_base 15: mod_base = OTHER; note = 2'-O-methylcytidine-3'-phosphate
  modified_base 16: mod_base = OTHER; note = 2'-deoxy-2'-fluoroadenosine-3'-phosphate
  modified_base 17: mod_base = OTHER; note = 2'-O-methylguanosine-3'-phosphate
  modified_base 18: mod_base = OTHER; note = 2'-O-methyluridine-3'-phosphate
  modified_base 19: mod_base = OTHER; note = 2'-O-methylguanosine-3'-phosphate
  modified_base 20: mod_base = OTHER; note = 2'-O-methyladenosine-3'-phosphate
  modified_base 21: mod_base = OTHER; note = 2'-O-methyluridine-3'-phosphorothioate
  modified_base 22: mod_base = OTHER; note = 2'-O-methyluridine-3'-phosphorothioate
  modified_base 23: mod_base = OTHER; note = 2'-O-methyluridine
aatagaagcaggagcagtgattt

SEQ ID NO: 1218 - RNA, 23 nt, synthetic construct
  source 1..23: mol_type = other RNA
  modified_base 1: mod_base = OTHER; note = 2'-O-methyladenosine-3'-phosphorothioate
  modified_base 2: mod_base = OTHER; note = 2'-deoxy-2'-fluorocytidine-3'-phosphorothioate
  modified_base 3: mod_base = OTHER; note = 2'-O-methyluridine-3'-phosphate
  modified_base 4: mod_base = OTHER; note = 2'-O-methyladenosine-3'-phosphate
  modified_base 5: mod_base = OTHER; note = 2'-O-methyluridine-3'-phosphate
  modified_base 6: mod_base = OTHER; note = 2'-deoxy-2'-fluorocytidine-3'-phosphate
  modified_base 7: mod_base = OTHER; note = 2'-O-methyladenosine-3'-phosphate
  modified_base 8: mod_base = OTHER; note = 2'-deoxy-2'-fluoroadenosine-3'-phosphate
  modified_base 9: mod_base = OTHER; note = 2'-deoxy-2'-fluorocytidine-3'-phosphate
  modified_base 10: mod_base = OTHER; note = 2'-O-methyladenosine-3'-phosphate
  modified_base 11: mod_base = OTHER; note = 2'-O-methyluridine-3'-phosphate
  modified_base 12: mod_base = OTHER; note = 2'-O-methyladenosine-3'-phosphate
  modified_base 13: mod_base = OTHER; note = 2'-O-methylguanosine-3'-phosphate
  modified_base 14: mod_base = OTHER; note = 2'-deoxy-2'-fluoroadenosine-3'-phosphate
  modified_base 15: mod_base = OTHER; note = 2'-O-methyladenosine-3'-phosphate
  modified_base 16: mod_base = OTHER; note = 2'-deoxy-2'-fluoroguanosine-3'-phosphate
  modified_base 17: mod_base = OTHER; note = 2'-O-methylcytidine-3'-phosphate
  modified_base 18: mod_base = OTHER; note = 2'-O-methyladenosine-3'-phosphate
  modified_base 19: mod_base = OTHER; note = 2'-O-methylguanosine-3'-phosphate
  modified_base 20: mod_base = OTHER; note = 2'-O-methylguanosine-3'-phosphate
  modified_base 21: mod_base = OTHER; note = 2'-O-methyladenosine-3'-phosphorothioate
  modified_base 22: mod_base = OTHER; note = 2'-O-methylguanosine-3'-phosphorothioate
  modified_base 23: mod_base = OTHER; note = 2'-O-methylcytidine
actatcaacatagaagcaggagc

SEQ ID NO: 1219 - RNA, 23 nt, synthetic construct
  source 1..23: mol_type = other RNA
  modified_base 1: mod_base = OTHER; note = 2'-O-methyladenosine-3'-phosphorothioate
  modified_base 2: mod_base = OTHER; note = 2'-deoxy-2'-fluoroadenosine-3'-phosphorothioate
  modified_base 3: mod_base = OTHER; note = 2'-O-methylcytidine-3'-phosphate
  modified_base 4: mod_base = OTHER; note = 2'-O-methyladenosine-3'-phosphate
  modified_base 5: mod_base = OTHER; note = 2'-O-methyluridine-3'-phosphate
  modified_base 6: mod_base = OTHER; note = 2'-deoxy-2'-fluorocytidine-3'-phosphate
  modified_base 7: mod_base = OTHER; note = 2'-O-methyladenosine-3'-phosphate
  modified_base 8: mod_base = OTHER; note = 2'-deoxy-2'-fluorocytidine-3'-phosphate
  modified_base 9: mod_base = OTHER; note = 2'-deoxy-2'-fluoroadenosine-3'-phosphate
  modified_base 10: mod_base = OTHER; note = 2'-O-methylcytidine-3'-phosphate
  modified_base 11: mod_base = OTHER; note = 2'-O-methyladenosine-3'-phosphate
  modified_base 12: mod_base = OTHER; note = 2'-O-methyladenosine-3'-phosphate
  modified_base 13: mod_base = OTHER; note = 2'-O-methylguanosine-3'-phosphate
  modified_base 14: mod_base = OTHER; note = 2'-deoxy-2'-fluorouridine-3'-phosphate
  modified_base 15: mod_base = OTHER; note = 2'-O-methyladenosine-3'-phosphate
  modified_base 16: mod_base = OTHER; note = 2'-deoxy-2'-fluoroguanosine-3'-phosphate
  modified_base 17: mod_base = OTHER; note = 2'-O-methyluridine-3'-phosphate
  modified_base 18: mod_base = OTHER; note = 2'-O-methylguanosine-3'-phosphate
  modified_base 19: mod_base = OTHER; note = 2'-O-methyladenosine-3'-phosphate
  modified_base 20: mod_base = OTHER; note = 2'-O-methyluridine-3'-phosphate
  modified_base 21: mod_base = OTHER; note = 2'-O-methylcytidine-3'-phosphorothioate
  modified_base 22: mod_base = OTHER; note = 2'-O-methylcytidine-3'-phosphorothioate
  modified_base 23: mod_base = OTHER; note = 2'-O-methylcytidine
aacatcacacaagtagtgatccc

SEQ ID NO: 1220 - RNA, 23 nt, synthetic construct
  source 1..23: mol_type = other RNA
  modified_base 1: mod_base = OTHER; note = 2'-O-methyladenosine-3'-phosphorothioate
  modified_base 2: mod_base = OTHER; note = 2'-deoxy-2'-fluorocytidine-3'-phosphorothioate
  modified_base 3: mod_base = OTHER; note = 2'-O-methyladenosine-3'-phosphate
  modified_base 4: mod_base = OTHER; note = 2'-O-methyluridine-3'-phosphate
  modified_base 5: mod_base = OTHER; note = 2'-O-methylguanosine-3'-phosphate
  modified_base 6: mod_base = OTHER; note = 2'-deoxy-2'-fluorouridine-3'-phosphate
  modified_base 7: mod_base = OTHER; note = 2'-O-methylcytidine-3'-phosphate
  modified_base 8: mod_base = OTHER; note = 2'-deoxy-2'-fluoroadenosine-3'-phosphate
  modified_base 9: mod_base = OTHER; note = 2'-deoxy-2'-fluorocytidine-3'-phosphate
  modified_base 10: mod_base = OTHER; note = 2'-O-methyladenosine-3'-phosphate
  modified_base 11: mod_base = OTHER; note = 2'-O-methyluridine-3'-phosphate
  modified_base 12: mod_base = OTHER; note = 2'-O-methylcytidine-3'-phosphate
  modified_base 13: mod_base = OTHER; note = 2'-O-methyladenosine-3'-phosphate
  modified_base 14: mod_base = OTHER; note = 2'-deoxy-2'-fluorocytidine-3'-phosphate
  modified_base 15: mod_base = OTHER; note = 2'-O-methyladenosine-3'-phosphate
  modified_base 16: mod_base = OTHER; note = 2'-deoxy-2'-fluorocytidine-3'-phosphate
  modified_base 17: mod_base = OTHER; note = 2'-O-methyladenosine-3'-phosphate
  modified_base 18: mod_base = OTHER; note = 2'-O-methyladenosine-3'-phosphate
  modified_base 19: mod_base = OTHER; note = 2'-O-methylguanosine-3'-phosphate
  modified_base 20: mod_base = OTHER; note = 2'-O-methyluridine-3'-phosphate
  modified_base 21: mod_base = OTHER; note = 2'-O-methyladenosine-3'-phosphorothioate
  modified_base 22: mod_base = OTHER; note = 2'-O-methylguanosine-3'-phosphorothioate
  modified_base 23: mod_base = OTHER; note = 2'-O-methyluridine
acatgtcacatcacacaagtagt

SEQ ID NO: 1221 - RNA, 23 nt, synthetic construct
  source 1..23: mol_type = other RNA
  modified_base 1: mod_base = OTHER; note = 2'-O-methyladenosine-3'-phosphorothioate
  modified_base 2: mod_base = OTHER; note = 2'-deoxy-2'-fluorouridine-3'-phosphorothioate
  modified_base 3: mod_base = OTHER; note = 2'-O-methyluridine-3'-phosphate
  modified_base 4: mod_base = OTHER; note = 2'-O-methylcytidine-3'-phosphate
  modified_base 5: mod_base = OTHER; note = 2'-O-methyluridine-3'-phosphate
  modified_base 6: mod_base = OTHER; note = 2'-deoxy-2'-fluorouridine-3'-phosphate
  modified_base 7: mod_base = OTHER; note = 2'-O-methylguanosine-3'-phosphate
  modified_base 8: mod_base = OTHER; note = 2'-deoxy-2'-fluorouridine-3'-phosphate
  modified_base 9: mod_base = OTHER; note = 2'-deoxy-2'-fluoroguanosine-3'-phosphate
  modified_base 10: mod_base = OTHER; note = 2'-O-methyluridine-3'-phosphate
  modified_base 11: mod_base = OTHER; note = 2'-O-methyluridine-3'-phosphate
  modified_base 12: mod_base = OTHER; note = 2'-O-methylguanosine-3'-phosphate
  modified_base 13: mod_base = OTHER; note = 2'-O-methylcytidine-3'-phosphate
  modified_base 14: mod_base = OTHER; note = 2'-deoxy-2'-fluorocytidine-3'-phosphate
  modified_base 15: mod_base = OTHER; note = 2'-O-methylcytidine-3'-phosphate
  modified_base 16: mod_base = OTHER; note = 2'-deoxy-2'-fluoroadenosine-3'-phosphate
  modified_base 17: mod_base = OTHER; note = 2'-O-methyluridine-3'-phosphate
  modified_base 18: mod_base = OTHER; note = 2'-O-methylguanosine-3'-phosphate
  modified_base 19: mod_base = OTHER; note = 2'-O-methyluridine-3'-phosphate
  modified_base 20: mod_base = OTHER; note = 2'-O-methylcytidine-3'-phosphate
  modified_base 21: mod_base = OTHER; note = 2'-O-methyladenosine-3'-phosphorothioate
  modified_base 22: mod_base = OTHER; note = 2'-O-methylcytidine-3'-phosphorothioate
  modified_base 23: mod_base = OTHER; note = 2'-O-methyladenosine
attcttgtgttgcccatgtcaca

SEQ ID NO: 1222 - RNA, 23 nt, synthetic construct
  source 1..23: mol_type = other RNA
  modified_base 1: mod_base = OTHER; note = 2'-O-methyladenosine-3'-phosphorothioate
  modified_base 2: mod_base = OTHER; note = 2'-deoxy-2'-fluoroadenosine-3'-phosphorothioate
  modified_base 3: mod_base = OTHER; note = 2'-O-methyladenosine-3'-phosphate
  modified_base 4: mod_base = OTHER; note = 2'-O-methyluridine-3'-phosphate
  modified_base 5: mod_base = OTHER; note = 2'-O-methyluridine-3'-phosphate
  modified_base 6: mod_base = OTHER; note = 2'-deoxy-2'-fluorocytidine-3'-phosphate
  modified_base 7: mod_base = OTHER; note = 2'-O-methyluridine-3'-phosphate
  modified_base 8: mod_base = OTHER; note = 2'-deoxy-2'-fluorouridine-3'-phosphate
  modified_base 9: mod_base = OTHER; note = 2'-deoxy-2'-fluorouridine-3'-phosphate
  modified_base 10: mod_base = OTHER; note = 2'-O-methylcytidine-3'-phosphate
  modified_base 11: mod_base = OTHER; note = 2'-O-methyluridine-3'-phosphate
  modified_base 12: mod_base = OTHER; note = 2'-O-methyluridine-3'-phosphate
  modified_base 13: mod_base = OTHER; note = 2'-O-methylguanosine-3'-phosphate
  modified_base 14: mod_base = OTHER; note = 2'-deoxy-2'-fluorouridine-3'-phosphate
  modified_base 15: mod_base = OTHER; note = 2'-O-methylguanosine-3'-phosphate
  modified_base 16: mod_base = OTHER; note = 2'-deoxy-2'-fluorouridine-3'-phosphate
  modified_base 17: mod_base = OTHER; note = 2'-O-methyluridine-3'-phosphate
  modified_base 18: mod_base = OTHER; note = 2'-O-methylguanosine-3'-phosphate
  modified_base 19: mod_base = OTHER; note = 2'-O-methylcytidine-3'-phosphate
  modified_base 20: mod_base = OTHER; note = 2'-O-methylcytidine-3'-phosphate
  modified_base 21: mod_base = OTHER; note = 2'-O-methylcytidine-3'-phosphorothioate
  modified_base 22: mod_base = OTHER; note = 2'-O-methyladenosine-3'-phosphorothioate
  modified_base 23: mod_base = OTHER; note = 2'-O-methyluridine
aaattctttcttgtgttgcccat

SEQ ID NO: 1223 - RNA, 23 nt, synthetic construct
  source 1..23: mol_type = other RNA
  modified_base 1: mod_base = OTHER; note = 2'-O-methyladenosine-3'-phosphorothioate
  modified_base 2: mod_base = OTHER; note = 2'-deoxy-2'-fluorocytidine-3'-phosphorothioate
  modified_base 3: mod_base = OTHER; note = 2'-O-methyladenosine-3'-phosphate
  modified_base 4: mod_base = OTHER; note = 2'-O-methyladenosine-3'-phosphate
  modified_base 5: mod_base = OTHER; note = 2'-O-methyladenosine-3'-phosphate
  modified_base 6: mod_base = OTHER; note = 2'-deoxy-2'-fluoroguanosine-3'-phosphate
  modified_base 7: mod_base = OTHER; note = 2'-O-methyladenosine-3'-phosphate
  modified_base 8: mod_base = OTHER; note = 2'-deoxy-2'-fluoroadenosine-3'-phosphate
  modified_base 9: mod_base = OTHER; note = 2'-deoxy-2'-fluoroadenosine-3'-phosphate
  modified_base 10: mod_base = OTHER; note = 2'-O-methyluridine-3'-phosphate
  modified_base 11: mod_base = OTHER; note = 2'-O-methyluridine-3'-phosphate
  modified_base 12: mod_base = OTHER; note = 2'-O-methylcytidine-3'-phosphate
  modified_base 13: mod_base = OTHER; note = 2'-O-methyluridine-3'-phosphate
  modified_base 14: mod_base = OTHER; note = 2'-deoxy-2'-fluorouridine-3'-phosphate
  modified_base 15: mod_base = OTHER; note = 2'-O-methyluridine-3'-phosphate
  modified_base 16: mod_base = OTHER; note = 2'-deoxy-2'-fluorocytidine-3'-phosphate
  modified_base 17: mod_base = OTHER; note = 2'-O-methyluridine-3'-phosphate
  modified_base 18: mod_base = OTHER; note = 2'-O-methyluridine-3'-phosphate
  modified_base 19: mod_base = OTHER; note = 2'-O-methylguanosine-3'-phosphate
  modified_base 20: mod_base = OTHER; note = 2'-O-methyluridine-3'-phosphate
  modified_base 21: mod_base = OTHER; note = 2'-O-methylguanosine-3'-phosphorothioate
  modified_base 22: mod_base = OTHER; note = 2'-O-methyluridine-3'-phosphorothioate
  modified_base 23: mod_base = OTHER; note = 2'-O-methyluridine
acaaagaaattctttcttgtgtt

SEQ ID NO: 1224 - RNA, 23 nt, synthetic construct
  source 1..23: mol_type = other RNA
  modified_base 1: mod_base = OTHER; note = 2'-O-methyladenosine-3'-phosphorothioate
  modified_base 2: mod_base = OTHER; note = 2'-deoxy-2'-fluorocytidine-3'-phosphorothioate
  modified_base 3: mod_base = OTHER; note = 2'-O-methylcytidine-3'-phosphate
  modified_base 4: mod_base = OTHER; note = 2'-O-methyladenosine-3'-phosphate
  modified_base 5: mod_base = OTHER; note = 2'-O-methylcytidine-3'-phosphate
  modified_base 6: mod_base = OTHER; note = 2'-deoxy-2'-fluorouridine-3'-phosphate
  modified_base 7: mod_base = OTHER; note = 2'-O-methylguanosine-3'-phosphate
  modified_base 8: mod_base = OTHER; note = 2'-deoxy-2'-fluorocytidine-3'-phosphate
  modified_base 9: mod_base = OTHER; note = 2'-deoxy-2'-fluoroadenosine-3'-phosphate
  modified_base 10: mod_base = OTHER; note = 2'-O-methyladenosine-3'-phosphate
  modified_base 11: mod_base = OTHER; note = 2'-O-methyladenosine-3'-phosphate
  modified_base 12: mod_base = OTHER; note = 2'-O-methylguanosine-3'-phosphate
  modified_base 13: mod_base = OTHER; note = 2'-O-methyladenosine-3'-phosphate
  modified_base 14: mod_base = OTHER; note = 2'-deoxy-2'-fluoroadenosine-3'-phosphate
  modified_base 15: mod_base = OTHER; note = 2'-O-methyladenosine-3'-phosphate
  modified_base 16: mod_base = OTHER; note = 2'-deoxy-2'-fluorouridine-3'-phosphate
  modified_base 17: mod_base = OTHER; note = 2'-O-methyluridine-3'-phosphate
  modified_base 18: mod_base = OTHER; note = 2'-O-methylcytidine-3'-phosphate
  modified_base 19: mod_base = OTHER; note = 2'-O-methyluridine-3'-phosphate
  modified_base 20: mod_base = OTHER; note = 2'-O-methyluridine-3'-phosphate
  modified_base 21: mod_base = OTHER; note = 2'-O-methyluridine-3'-phosphorothioate
  modified_base 22: mod_base = OTHER; note = 2'-O-methylcytidine-3'-phosphorothioate
  modified_base 23: mod_base = OTHER; note = 2'-O-methyluridine
accactgcaaagaaattctttct

SEQ ID NO: 1225 - RNA, 23 nt, synthetic construct
  source 1..23: mol_type = other RNA
  modified_base 1: mod_base = OTHER; note = 2'-O-methyladenosine-3'-phosphorothioate
  modified_base 2: mod_base = OTHER; note = 2'-deoxy-2'-fluorouridine-3'-phosphorothioate
  modified_base 3: mod_base = OTHER; note = 2'-O-methylcytidine-3'-phosphate
  modified_base 4: mod_base = OTHER; note = 2'-O-methyluridine-3'-phosphate
  modified_base 5: mod_base = OTHER; note = 2'-O-methylguanosine-3'-phosphate
  modified_base 6: mod_base = OTHER; note = 2'-deoxy-2'-fluoroadenosine-3'-phosphate
  modified_base 7: mod_base = OTHER; note = 2'-O-methyladenosine-3'-phosphate
  modified_base 8: mod_base = OTHER; note = 2'-deoxy-2'-fluorouridine-3'-phosphate
  modified_base 9: mod_base = OTHER; note = 2'-deoxy-2'-fluorocytidine-3'-phosphate
  modified_base 10: mod_base = OTHER; note = 2'-O-methylcytidine-3'-phosphate
  modified_base 11: mod_base = OTHER; note = 2'-O-methyluridine-3'-phosphate
  modified_base 12: mod_base = OTHER; note = 2'-O-methylcytidine-3'-phosphate
  modified_base 13: mod_base = OTHER; note = 2'-O-methylcytidine-3'-phosphate
  modified_base 14: mod_base = OTHER; note = 2'-deoxy-2'-fluorouridine-3'-phosphate
  modified_base 15: mod_base = OTHER; note = 2'-O-methylguanosine-3'-phosphate
  modified_base 16: mod_base = OTHER; note = 2'-deoxy-2'-fluoroadenosine-3'-phosphate
  modified_base 17: mod_base = OTHER; note = 2'-O-methylguanosine-3'-phosphate
  modified_base 18: mod_base = OTHER; note = 2'-O-methylcytidine-3'-phosphate
  modified_base 19: mod_base = OTHER; note = 2'-O-methylcytidine-3'-phosphate
  modified_base 20: mod_base = OTHER; note = 2'-O-methyladenosine-3'-phosphate
  modified_base 21: mod_base = OTHER; note = 2'-O-methylcytidine-3'-phosphorothioate
  modified_base 22: mod_base = OTHER; note = 2'-O-methyluridine-3'-phosphorothioate
  modified_base 23: mod_base = OTHER; note = 2'-O-methylguanosine
atctgaatcctcctgagccactg

SEQ ID NO: 1226 - RNA, 23 nt, synthetic construct
  source 1..23: mol_type = other RNA
  modified_base 1: mod_base = OTHER; note = 2'-O-methyladenosine-3'-phosphorothioate
  modified_base 2: mod_base = OTHER; note = 2'-deoxy-2'-fluoroadenosine-3'-phosphorothioate
  modified_base 3: mod_base = OTHER; note = 2'-O-methyladenosine-3'-phosphate
  modified_base 4: mod_base = OTHER; note = 2'-O-methyluridine-3'-phosphate
  modified_base 5: mod_base = OTHER; note = 2'-O-methyladenosine-3'-phosphate
  modified_base 6: mod_base = OTHER; note = 2'-deoxy-2'-fluoroguanosine-3'-phosphate
  modified_base 7: mod_base = OTHER; note = 2'-O-methyluridine-3'-phosphate
  modified_base 8: mod_base = OTHER; note = 2'-deoxy-2'-fluorouridine-3'-phosphate
  modified_base 9: mod_base = OTHER; note = 2'-deoxy-2'-fluorocytidine-3'-phosphate
  modified_base 10: mod_base = OTHER; note = 2'-O-methyluridine-3'-phosphate
  modified_base 11: mod_base = OTHER; note = 2'-O-methylguanosine-3'-phosphate
  modified_base 12: mod_base = OTHER; note = 2'-O-methyladenosine-3'-phosphate
  modified_base 13: mod_base = OTHER; note = 2'-O-methyladenosine-3'-phosphate
  modified_base 14: mod_base = OTHER; note = 2'-deoxy-2'-fluorouridine-3'-phosphate
  modified_base 15: mod_base = OTHER; note = 2'-O-methylcytidine-3'-phosphate
  modified_base 16: mod_base = OTHER; note = 2'-deoxy-2'-fluorocytidine-3'-phosphate
  modified_base 17: mod_base = OTHER; note = 2'-O-methyluridine-3'-phosphate
  modified_base 18: mod_base = OTHER; note = 2'-O-methylcytidine-3'-phosphate
  modified_base 19: mod_base = OTHER; note = 2'-O-methylcytidine-3'-phosphate
  modified_base 20: mod_base = OTHER; note = 2'-O-methyluridine-3'-phosphate
  modified_base 21: mod_base = OTHER; note = 2'-O-methylguanosine-3'-phosphorothioate
  modified_base 22: mod_base = OTHER; note = 2'-O-methyladenosine-3'-phosphorothioate
  modified_base 23: mod_base = OTHER; note = 2'-O-methylguanosine
aaatagttctgaatcctcctgag

SEQ ID NO: 1227 - RNA, 23 nt, synthetic construct
  source 1..23: mol_type = other RNA
  modified_base 1: mod_base = OTHER; note = 2'-O-methyladenosine-3'-phosphorothioate
  modified_base 2: mod_base = OTHER; note = 2'-deoxy-2'-fluorouridine-3'-phosphorothioate
  modified_base 3: mod_base = OTHER; note = 2'-O-methylguanosine-3'-phosphate
  modified_base 4: mod_base = OTHER; note = 2'-O-methyladenosine-3'-phosphate
  modified_base 5: mod_base = OTHER; note = 2'-O-methylcytidine-3'-phosphate
  modified_base 6: mod_base = OTHER; note = 2'-deoxy-2'-fluorocytidine-3'-phosphate
  modified_base 7: mod_base = OTHER; note = 2'-O-methylguanosine-3'-phosphate
  modified_base 8: mod_base = OTHER; note = 2'-deoxy-2'-fluoroadenosine-3'-phosphate
  modified_base 9: mod_base = OTHER; note = 2'-deoxy-2'-fluoroadenosine-3'-phosphate
  modified_base 10: mod_base = OTHER; note = 2'-O-methyluridine-3'-phosphate
  modified_base 11: mod_base = OTHER; note = 2'-O-methyladenosine-3'-phosphate
  modified_base 12: mod_base = OTHER; note = 2'-O-methylguanosine-3'-phosphate
  modified_base 13: mod_base = OTHER; note = 2'-O-methyluridine-3'-phosphate
  modified_base 14: mod_base = OTHER; note = 2'-deoxy-2'-fluorouridine-3'-phosphate
  modified_base 15: mod_base = OTHER; note = 2'-O-methylcytidine-3'-phosphate
  modified_base 16: mod_base = OTHER; note = 2'-deoxy-2'-fluorouridine-3'-phosphate
  modified_base 17: mod_base = OTHER; note = 2'-O-methylguanosine-3'-phosphate
  modified_base 18: mod_base = OTHER; note = 2'-O-methyladenosine-3'-phosphate
  modified_base 19: mod_base = OTHER; note = 2'-O-methyladenosine-3'-phosphate
  modified_base 20: mod_base = OTHER; note = 2'-O-methyluridine-3'-phosphate
  modified_base 21: mod_base = OTHER; note = 2'-O-methylcytidine-3'-phosphorothioate
  modified_base 22: mod_base = OTHER; note = 2'-O-methylcytidine-3'-phosphorothioate
  modified_base 23: mod_base = OTHER; note = 2'-O-methyluridine
atgaccgaatagttctgaatcct

SEQ ID NO: 1228 - RNA, 23 nt, synthetic construct
  source 1..23: mol_type = other RNA
  modified_base 1: mod_base = OTHER; note = 2'-O-methyladenosine-3'-phosphorothioate
  modified_base 2: mod_base = OTHER; note = 2'-deoxy-2'-fluoroadenosine-3'-phosphorothioate
  modified_base 3: mod_base = OTHER; note = 2'-O-methyladenosine-3'-phosphate
  modified_base 4: mod_base = OTHER; note = 2'-O-methyladenosine-3'-phosphate
  modified_base 5: mod_base = OTHER; note = 2'-O-methyluridine-3'-phosphate
  modified_base 6: mod_base = OTHER; note = 2'-deoxy-2'-fluoroadenosine-3'-phosphate
  modified_base 7: mod_base = OTHER; note = 2'-O-methyluridine-3'-phosphate
  modified_base 8: mod_base = OTHER; note = 2'-deoxy-2'-fluorocytidine-3'-phosphate
  modified_base 9: mod_base = OTHER; note = 2'-deoxy-2'-fluorocytidine-3'-phosphate
  modified_base 10: mod_base = OTHER; note = 2'-O-methyladenosine-3'-phosphate
  modified_base 11: mod_base = OTHER; note = 2'-O-methyluridine-3'-phosphate
  modified_base 12: mod_base = OTHER; note = 2'-O-methylguanosine-3'-phosphate
  modified_base 13: mod_base = OTHER; note = 2'-O-methyladenosine-3'-phosphate
  modified_base 14: mod_base = OTHER; note = 2'-deoxy-2'-fluorocytidine-3'-phosphate
  modified_base 15: mod_base = OTHER; note = 2'-O-methylcytidine-3'-phosphate
  modified_base 16: mod_base = OTHER; note = 2'-deoxy-2'-fluoroguanosine-3'-phosphate
  modified_base 17: mod_base = OTHER; note = 2'-O-methyladenosine-3'-phosphate
  modified_base 18: mod_base = OTHER; note = 2'-O-methyladenosine-3'-phosphate
  modified_base 19: mod_base = OTHER; note = 2'-O-methyluridine-3'-phosphate
  modified_base 20: mod_base = OTHER; note = 2'-O-methyladenosine-3'-phosphate
  modified_base 21: mod_base = OTHER; note = 2'-O-methylguanosine-3'-phosphorothioate
  modified_base 22: mod_base = OTHER; note = 2'-O-methyluridine-3'-phosphorothioate
  modified_base 23: mod_base = OTHER; note = 2'-O-methyluridine
aaaatatccatgaccgaatagtt

SEQ ID NO: 1229 - RNA, 23 nt, synthetic construct
  source 1..23: mol_type = other RNA
  modified_base 1: mod_base = OTHER; note = 2'-O-methyladenosine-3'-phosphorothioate
  modified_base 2: mod_base = OTHER; note = 2'-deoxy-2'-fluoroadenosine-3'-phosphorothioate
  modified_base 3: mod_base = OTHER; note = 2'-O-methylguanosine-3'-phosphate
  modified_base 4: mod_base = OTHER; note = 2'-O-methyluridine-3'-phosphate
  modified_base 5: mod_base = OTHER; note = 2'-O-methylcytidine-3'-phosphate
  modified_base 6: mod_base = OTHER; note = 2'-deoxy-2'-fluoroadenosine-3'-phosphate
  modified_base 7: mod_base = OTHER; note = 2'-O-methylcytidine-3'-phosphate
  modified_base 8: mod_base = OTHER; note = 2'-deoxy-2'-fluoroadenosine-3'-phosphate
  modified_base 9: mod_base = OTHER; note = 2'-deoxy-2'-fluoroadenosine-3'-phosphate
  modified_base 10: mod_base = OTHER; note = 2'-O-methyladenosine-3'-phosphate
  modified_base 11: mod_base = OTHER; note = 2'-O-methyluridine-3'-phosphate
  modified_base 12: mod_base = OTHER; note = 2'-O-methyladenosine-3'-phosphate
  modified_base 13: mod_base = OTHER; note = 2'-O-methyluridine-3'-phosphate
  modified_base 14: mod_base = OTHER; note = 2'-deoxy-2'-fluorocytidine-3'-phosphate
  modified_base 15: mod_base = OTHER; note = 2'-O-methylcytidine-3'-phosphate
  modified_base 16: mod_base = OTHER; note = 2'-deoxy-2'-fluoroadenosine-3'-phosphate
  modified_base 17: mod_base = OTHER; note = 2'-O-methyluridine-3'-phosphate
  modified_base 18: mod_base = OTHER; note = 2'-O-methylguanosine-3'-phosphate
  modified_base 19: mod_base = OTHER; note = 2'-O-methyladenosine-3'-phosphate
  modified_base 20: mod_base = OTHER; note = 2'-O-methylcytidine-3'-phosphate
  modified_base 21: mod_base = OTHER; note = 2'-O-methylcytidine-3'-phosphorothioate
  modified_base 22: mod_base = OTHER; note = 2'-O-methylguanosine-3'-phosphorothioate
  modified_base 23: mod_base = OTHER; note = 2'-O-methyladenosine
aagtcacaaatatccatgaccga

SEQ ID NO: 1230 - RNA, 23 nt, synthetic construct
  source 1..23: mol_type = other RNA
  modified_base 1: mod_base = OTHER; note = 2'-O-methyladenosine-3'-phosphorothioate
  modified_base 2: mod_base = OTHER; note = 2'-deoxy-2'-fluorocytidine-3'-phosphorothioate
  modified_base 3: mod_base = OTHER; note = 2'-O-methyladenosine-3'-phosphate
  modified_base 4: mod_base = OTHER; note = 2'-O-methyluridine-3'-phosphate
  modified_base 5: mod_base = OTHER; note = 2'-O-methylcytidine-3'-phosphate
  modified_base 6: mod_base = OTHER; note = 2'-deoxy-2'-fluoroadenosine-3'-phosphate
  modified_base 7: mod_base = OTHER; note = 2'-O-methyluridine-3'-phosphate
  modified_base 8: mod_base = OTHER; note = 2'-deoxy-2'-fluoroadenosine-3'-phosphate
  modified_base 9: mod_base = OTHER; note = 2'-deoxy-2'-fluoroguanosine-3'-phosphate
  modified_base 10: mod_base = OTHER; note = 2'-O-methyluridine-3'-phosphate
  modified_base 11: mod_base = OTHER; note = 2'-O-methylcytidine-3'-phosphate
  modified_base 12: mod_base = OTHER; note = 2'-O-methyladenosine-3'-phosphate
  modified_base 13: mod_base = OTHER; note = 2'-O-methylcytidine-3'-phosphate
  modified_base 14: mod_base = OTHER; note = 2'-deoxy-2'-fluoroadenosine-3'-phosphate
  modified_base 15: mod_base = OTHER; note = 2'-O-methyladenosine-3'-phosphate
  modified_base 16: mod_base = OTHER; note = 2'-deoxy-2'-fluoroadenosine-3'-phosphate
  modified_base 17: mod_base = OTHER; note = 2'-O-methyluridine-3'-phosphate
  modified_base 18: mod_base = OTHER; note = 2'-O-methyladenosine-3'-phosphate
  modified_base 19: mod_base = OTHER; note = 2'-O-methyluridine-3'-phosphate
  modified_base 20: mod_base = OTHER; note = 2'-O-methylcytidine-3'-phosphate
  modified_base 21: mod_base = OTHER; note = 2'-O-methylcytidine-3'-phosphorothioate
  modified_base 22: mod_base = OTHER; note = 2'-O-methyladenosine-3'-phosphorothioate
  modified_base 23: mod_base = OTHER; note = 2'-O-methyluridine
acatcatagtcacaaatatccat

SEQ ID NO: 1231 - RNA, 23 nt, synthetic construct
  source 1..23: mol_type = other RNA
  modified_base 1: mod_base = OTHER; note = 2'-O-methyladenosine-3'-phosphorothioate
  modified_base 2: mod_base = OTHER; note = 2'-deoxy-2'-fluorocytidine-3'-phosphorothioate
  modified_base 3: mod_base = OTHER; note = 2'-O-methyluridine-3'-phosphate
  modified_base 4: mod_base = OTHER; note = 2'-O-methylguanosine-3'-phosphate
  modified_base 5: mod_base = OTHER; note = 2'-O-methylguanosine-3'-phosphate
  modified_base 6: mod_base = OTHER; note = 2'-deoxy-2'-fluoroadenosine-3'-phosphate
  modified_base 7: mod_base = OTHER; note = 2'-O-methyluridine-3'-phosphate
  modified_base 8: mod_base = OTHER; note = 2'-deoxy-2'-fluorouridine-3'-phosphate
  modified_base 9: mod_base = OTHER; note = 2'-deoxy-2'-fluorocytidine-3'-phosphate
  modified_base 10: mod_base = OTHER; note = 2'-O-methyladenosine-3'-phosphate
  modified_base 11: mod_base = OTHER; note = 2'-O-methyluridine-3'-phosphate
  modified_base 12: mod_base = OTHER; note = 2'-O-methylcytidine-3'-phosphate
  modified_base 13: mod_base = OTHER; note = 2'-O-methyladenosine-3'-phosphate
  modified_base 14: mod_base = OTHER; note = 2'-deoxy-2'-fluorouridine-3'-phosphate
  modified_base 15: mod_base = OTHER; note = 2'-O-methyladenosine-3'-phosphate
  modified_base 16: mod_base = OTHER; note = 2'-deoxy-2'-fluoroguanosine-3'-phosphate
  modified_base 17: mod_base = OTHER; note = 2'-O-methyluridine-3'-phosphate
  modified_base 18: mod_base = OTHER; note = 2'-O-methylcytidine-3'-phosphate
  modified_base 19: mod_base = OTHER; note = 2'-O-methyladenosine-3'-phosphate
  modified_base 20: mod_base = OTHER; note = 2'-O-methylcytidine-3'-phosphate
  modified_base 21: mod_base = OTHER; note = 2'-O-methyladenosine-3'-phosphorothioate
  modified_base 22: mod_base = OTHER; note = 2'-O-methyladenosine-3'-phosphorothioate
  modified_base 23: mod_base = OTHER; note = 2'-O-methyladenosine
actggattcatcatagtcacaaa

SEQ ID NO: 1232 - RNA, 23 nt, synthetic construct
  source 1..23: mol_type = other RNA
  modified_base 1: mod_base = OTHER; note = 2'-O-methyladenosine-3'-phosphorothioate
  modified_base 2: mod_base = OTHER; note = 2'-deoxy-2'-fluorocytidine-3'-phosphorothioate
  modified_base 3: mod_base = OTHER; note = 2'-O-methyladenosine-3'-phosphate
  modified_base 4: mod_base = OTHER; note = 2'-O-methyluridine-3'-phosphate
  modified_base 5: mod_base = OTHER; note = 2'-O-methylcytidine-3'-phosphate
  modified_base 6: mod_base = OTHER; note = 2'-deoxy-2'-fluorouridine-3'-phosphate
  modified_base 7: mod_base = OTHER; note = 2'-O-methyluridine-3'-phosphate
  modified_base 8: mod_base = OTHER; note = 2'-deoxy-2'-fluorocytidine-3'-phosphate
  modified_base 9: mod_base = OTHER; note = 2'-deoxy-2'-fluorocytidine-3'-phosphate
  modified_base 10: mod_base = OTHER; note = 2'-O-methyladenosine-3'-phosphate
  modified_base 11: mod_base = OTHER; note = 2'-O-methylcytidine-3'-phosphate
  modified_base 12: mod_base = OTHER; note = 2'-O-methyluridine-3'-phosphate
  modified_base 13: mod_base = OTHER; note = 2'-O-methylguanosine-3'-phosphate
  modified_base 14: mod_base = OTHER; note = 2'-deoxy-2'-fluoroguanosine-3'-phosphate
  modified_base 15: mod_base = OTHER; note = 2'-O-methyladenosine-3'-phosphate
  modified_base 16: mod_base = OTHER; note = 2'-deoxy-2'-fluorouridine-3'-phosphate
  modified_base 17: mod_base = OTHER; note = 2'-O-methyluridine-3'-phosphate
  modified_base 18: mod_base = OTHER; note = 2'-O-methylcytidine-3'-phosphate
  modified_base 19: mod_base = OTHER; note = 2'-O-methyladenosine-3'-phosphate
  modified_base 20: mod_base = OTHER; note = 2'-O-methyluridine-3'-phosphate
  modified_base 21: mod_base = OTHER; note = 2'-O-methylcytidine-3'-phosphorothioate
  modified_base 22: mod_base = OTHER; note = 2'-O-methyladenosine-3'-phosphorothioate
  modified_base 23: mod_base = OTHER; note = 2'-O-methyluridine
acatcttccactggattcatcat

SEQ ID NO: 1233 - RNA, 23 nt, synthetic construct
  source 1..23: mol_type = other RNA
  modified_base 1: mod_base = OTHER; note = 2'-O-methyladenosine-3'-phosphorothioate
  modified_base 2: mod_base = OTHER; note = 2'-deoxy-2'-fluoroadenosine-3'-phosphorothioate
  modified_base 3: mod_base = OTHER; note = 2'-O-methylguanosine-3'-phosphate
  modified_base 4: mod_base = OTHER; note = 2'-O-methylcytidine-3'-phosphate
  modified_base 5: mod_base = OTHER; note = 2'-O-methyladenosine-3'-phosphate
  modified_base 6: mod_base = OTHER; note = 2'-deoxy-2'-fluoroguanosine-3'-phosphate
  modified_base 7: mod_base = OTHER; note = 2'-O-methyluridine-3'-phosphate
  modified_base 8: mod_base = OTHER; note = 2'-deoxy-2'-fluorouridine-3'-phosphate
  modified_base 9: mod_base = OTHER; note = 2'-deoxy-2'-fluorocytidine-3'-phosphate
  modified_base 10: mod_base = OTHER; note = 2'-O-methylcytidine-3'-phosphate
  modified_base 11: mod_base = OTHER; note = 2'-O-methyladenosine-3'-phosphate
  modified_base 12: mod_base = OTHER; note = 2'-O-methyluridine-3'-phosphate
  modified_base 13: mod_base = OTHER; note = 2'-O-methylcytidine-3'-phosphate
  modified_base 14: mod_base = OTHER; note = 2'-deoxy-2'-fluorouridine-3'-phosphate
  modified_base 15: mod_base = OTHER; note = 2'-O-methyluridine-3'-phosphate
  modified_base 16: mod_base = OTHER; note = 2'-deoxy-2'-fluorocytidine-3'-phosphate
  modified_base 17: mod_base = OTHER; note = 2'-O-methylcytidine-3'-phosphate
  modified_base 18: mod_base = OTHER; note = 2'-O-methyladenosine-3'-phosphate
  modified_base 19: mod_base = OTHER; note = 2'-O-methylcytidine-3'-phosphate
  modified_base 20: mod_base = OTHER; note = 2'-O-methyluridine-3'-phosphate
  modified_base 21: mod_base = OTHER; note = 2'-O-methylguanosine-3'-phosphorothioate
  modified_base 22: mod_base = OTHER; note = 2'-O-methylguanosine-3'-phosphorothioate
  modified_base 23: mod_base = OTHER; note = 2'-O-methyladenosine
aagcagttccatcttccactgga

SEQ ID NO: 1234 - RNA, 23 nt, synthetic construct
  source 1..23: mol_type = other RNA
  modified_base 1: mod_base = OTHER; note = 2'-O-methyladenosine-3'-phosphorothioate
  modified_base 2: mod_base = OTHER; note = 2'-deoxy-2'-fluorocytidine-3'-phosphorothioate
  modified_base 3: mod_base = OTHER; note = 2'-O-methylcytidine-3'-phosphate
  modified_base 4: mod_base = OTHER; note = 2'-O-methyladenosine-3'-phosphate
  modified_base 5: mod_base = OTHER; note = 2'-O-methylcytidine-3'-phosphate
  modified_base 6: mod_base = OTHER; note = 2'-deoxy-2'-fluorouridine-3'-phosphate
  modified_base 7: mod_base = OTHER; note = 2'-O-methyladenosine-3'-phosphate
  modified_base 8: mod_base = OTHER; note = 2'-deoxy-2'-fluoroadenosine-3'-phosphate
  modified_base 9: mod_base = OTHER; note = 2'-deoxy-2'-fluoroguanosine-3'-phosphate
  modified_base 10: mod_base = OTHER; note = 2'-O-methylcytidine-3'-phosphate
  modified_base 11: mod_base = OTHER; note = 2'-O-methyladenosine-3'-phosphate
  modified_base 12: mod_base = OTHER; note = 2'-O-methylguanosine-3'-phosphate
  modified_base 13: mod_base = OTHER; note = 2'-O-methyluridine-3'-phosphate
  modified_base 14: mod_base = OTHER; note = 2'-deoxy-2'-fluorouridine-3'-phosphate
  modified_base 15: mod_base = OTHER; note = 2'-O-methylcytidine-3'-phosphate
  modified_base 16: mod_base = OTHER; note = 2'-deoxy-2'-fluorocytidine-3'-phosphate
  modified_base 17: mod_base = OTHER; note = 2'-O-methyladenosine-3'-phosphate
  modified_base 18: mod_base = OTHER; note = 2'-O-methyluridine-3'-phosphate
  modified_base 19: mod_base = OTHER; note = 2'-O-methylcytidine-3'-phosphate
  modified_base 20: mod_base = OTHER; note = 2'-O-methyluridine-3'-phosphate
  modified_base 21: mod_base = OTHER; note = 2'-O-methyluridine-3'-phosphorothioate
  modified_base 22: mod_base = OTHER; note = 2'-O-methylcytidine-3'-phosphorothioate
  modified_base 23: mod_base = OTHER; note = 2'-O-methylcytidine
accactaagcagttccatcttcc

SEQ ID NO: 1235 - RNA, 23 nt, synthetic construct
  source 1..23: mol_type = other RNA
  modified_base 1: mod_base = OTHER; note = 2'-O-methyladenosine-3'-phosphorothioate
  modified_base 2: mod_base = OTHER; note = 2'-deoxy-2'-fluorouridine-3'-phosphorothioate
  modified_base 3: mod_base = OTHER; note = 2'-O-methyluridine-3'-phosphate
  modified_base 4: mod_base = OTHER; note = 2'-O-methylguanosine-3'-phosphate
  modified_base 5: mod_base = OTHER; note = 2'-O-methylcytidine-3'-phosphate
  modified_base 6: mod_base = OTHER; note = 2'-deoxy-2'-fluorocytidine-3'-phosphate
  modified_base 7: mod_base = OTHER; note = 2'-O-methylguanosine-3'-phosphate
  modified_base 8: mod_base = OTHER; note = 2'-deoxy-2'-fluorouridine-3'-phosphate
  modified_base 9: mod_base = OTHER; note = 2'-deoxy-2'-fluoroguanosine-3'-phosphate
  modified_base 10: mod_base = OTHER; note = 2'-O-methylcytidine-3'-phosphate
  modified_base 11: mod_base = OTHER; note = 2'-O-methylcytidine-3'-phosphate
  modified_base 12: mod_base = OTHER; note = 2'-O-methyladenosine-3'-phosphate
  modified_base 13: mod_base = OTHER; note = 2'-O-methylcytidine-3'-phosphate
  modified_base 14: mod_base = OTHER; note = 2'-deoxy-2'-fluorouridine-3'-phosphate
  modified_base 15: mod_base = OTHER; note = 2'-O-methyladenosine-3'-phosphate
  modified_base 16: mod_base = OTHER; note = 2'-deoxy-2'-fluoroadenosine-3'-phosphate
  modified_base 17: mod_base = OTHER; note = 2'-O-methylguanosine-3'-phosphate
  modified_base 18: mod_base = OTHER; note = 2'-O-methylcytidine-3'-phosphate
  modified_base 19: mod_base = OTHER; note = 2'-O-methyladenosine-3'-phosphate
  modified_base 20: mod_base = OTHER; note = 2'-O-methylguanosine-3'-phosphate
  modified_base 21: mod_base = OTHER; note = 2'-O-methyluridine-3'-phosphorothioate
  modified_base 22: mod_base = OTHER; note = 2'-O-methyluridine-3'-phosphorothioate
  modified_base 23: mod_base = OTHER; note = 2'-O-methylcytidine
attgccgtgccactaagcagttc

SEQ ID NO: 1236 - RNA, 23 nt, synthetic construct
  source 1..23: mol_type = other RNA
  modified_base 1: mod_base = OTHER; note = 2'-O-methyladenosine-3'-phosphorothioate
  modified_base 2: mod_base = OTHER; note = 2'-deoxy-2'-fluoroadenosine-3'-phosphorothioate
  modified_base 3: mod_base = OTHER; note = 2'-O-methyladenosine-3'-phosphate
  modified_base 4: mod_base = OTHER; note = 2'-O-methyluridine-3'-phosphate
  modified_base 5: mod_base = OTHER; note = 2'-O-methylguanosine-3'-phosphate
  modified_base 6: mod_base = OTHER; note = 2'-deoxy-2'-fluorouridine-3'-phosphate
  modified_base 7: mod_base = OTHER; note = 2'-O-methylguanosine-3'-phosphate
  modified_base 8: mod_base = OTHER; note = 2'-deoxy-2'-fluorouridine-3'-phosphate
  modified_base 9: mod_base = OTHER; note = 2'-deoxy-2'-fluorouridine-3'-phosphate
  modified_base 10: mod_base = OTHER; note = 2'-O-methylguanosine-3'-phosphate
  modified_base 11: mod_base = OTHER; note = 2'-O-methylcytidine-3'-phosphate
  modified_base 12: mod_base = OTHER; note = 2'-O-methylcytidine-3'-phosphate
  modified_base 13: mod_base = OTHER; note = 2'-O-methylguanosine-3'-phosphate
  modified_base 14: mod_base = OTHER; note = 2'-deoxy-2'-fluorouridine-3'-phosphate
  modified_base 15: mod_base = OTHER; note = 2'-O-methylguanosine-3'-phosphate
  modified_base 16: mod_base = OTHER; note = 2'-deoxy-2'-fluorocytidine-3'-phosphate
  modified_base 17: mod_base = OTHER; note = 2'-O-methylcytidine-3'-phosphate
  modified_base 18: mod_base = OTHER; note = 2'-O-methyladenosine-3'-phosphate
  modified_base 19: mod_base = OTHER; note = 2'-O-methylcytidine-3'-phosphate
  modified_base 20: mod_base = OTHER; note = 2'-O-methyluridine-3'-phosphate
  modified_base 21: mod_base = OTHER; note = 2'-O-methyladenosine-3'-phosphorothioate
  modified_base 22: mod_base = OTHER; note = 2'-O-methyladenosine-3'-phosphorothioate
  modified_base 23: mod_base = OTHER; note = 2'-O-methylguanosine
aaatgtgttgccgtgccactaag

SEQ ID NO: 1237 - RNA, 23 nt, synthetic construct
  source 1..23: mol_type = other RNA
  modified_base 1: mod_base = OTHER; note = 2'-O-methyladenosine-3'-phosphorothioate
  modified_base 2: mod_base = OTHER; note = 2'-deoxy-2'-fluoroadenosine-3'-phosphorothioate
  modified_base 3: mod_base = OTHER; note = 2'-O-methylcytidine-3'-phosphate
  modified_base 4: mod_base = OTHER; note = 2'-O-methyluridine-3'-phosphate
  modified_base 5: mod_base = OTHER; note = 2'-O-methylcytidine-3'-phosphate
  modified_base 6: mod_base = OTHER; note = 2'-deoxy-2'-fluoroadenosine-3'-phosphate
  modified_base 7: mod_base = OTHER; note = 2'-O-methyluridine-3'-phosphate
  modified_base 8: mod_base = OTHER; note = 2'-deoxy-2'-fluorouridine-3'-phosphate
  modified_base 9: mod_base = OTHER; note = 2'-deoxy-2'-fluorouridine-3'-phosphate
  modified_base 10: mod_base = OTHER; note = 2'-O-methylcytidine-3'-phosphate
  modified_base 11: mod_base = OTHER; note = 2'-O-methyladenosine-3'-phosphate
  modified_base 12: mod_base = OTHER; note = 2'-O-methyladenosine-3'-phosphate
  modified_base 13: mod_base = OTHER; note = 2'-O-methyluridine-3'-phosphate
  modified_base 14: mod_base = OTHER; note = 2'-deoxy-2'-fluoroguanosine-3'-phosphate
  modified_base 15: mod_base = OTHER; note = 2'-O-methyluridine-3'-phosphate
  modified_base 16: mod_base = OTHER; note = 2'-deoxy-2'-fluoroguanosine-3'-phosphate
  modified_base 17: mod_base = OTHER; note = 2'-O-methyluridine-3'-phosphate
  modified_base 18: mod_base = OTHER; note = 2'-O-methyluridine-3'-phosphate
  modified_base 19: mod_base = OTHER; note = 2'-O-methylguanosine-3'-phosphate
  modified_base 20: mod_base = OTHER; note = 2'-O-methylcytidine-3'-phosphate
  modified_base 21: mod_base = OTHER; note = 2'-O-methylcytidine-3'-phosphorothioate
  modified_base 22: mod_base = OTHER; note = 2'-O-methylguanosine-3'-phosphorothioate
  modified_base 23: mod_base = OTHER; note = 2'-O-methyluridine
aactcatttcaatgtgttgccgt

SEQ ID NO: 1238 - RNA, 23 nt, synthetic construct
  source 1..23: mol_type = other RNA
  modified_base 1: mod_base = OTHER; note = 2'-O-methyladenosine-3'-phosphorothioate
  modified_base 2: mod_base = OTHER; note = 2'-deoxy-2'-fluoroadenosine-3'-phosphorothioate
  modified_base 3: mod_base = OTHER; note = 2'-O-methylguanosine-3'-phosphate
  modified_base 4: mod_base = OTHER; note = 2'-O-methyluridine-3'-phosphate
  modified_base 5: mod_base = OTHER; note = 2'-O-methyladenosine-3'-phosphate
  modified_base 6: mod_base = OTHER; note = 2'-deoxy-2'-fluoroguanosine-3'-phosphate
  modified_base 7: mod_base = OTHER; note = 2'-O-methyluridine-3'-phosphate
  modified_base 8: mod_base = OTHER; note = 2'-deoxy-2'-fluoroadenosine-3'-phosphate
  modified_base 9: mod_base = OTHER; note = 2'-deoxy-2'-fluorocytidine-3'-phosphate
  modified_base 10: mod_base = OTHER; note = 2'-O-methyluridine-3'-phosphate
  modified_base 11: mod_base = OTHER; note = 2'-O-methylcytidine-3'-phosphate
  modified_base 12: mod_base = OTHER; note = 2'-O-methyladenosine-3'-phosphate
  modified_base 13: mod_base = OTHER; note = 2'-O-methyluridine-3'-phosphate
  modified_base 14: mod_base = OTHER; note = 2'-deoxy-2'-fluorouridine-3'-phosphate
  modified_base 15: mod_base = OTHER; note = 2'-O-methyluridine-3'-phosphate
  modified_base 16: mod_base = OTHER; note = 2'-deoxy-2'-fluorocytidine-3'-phosphate
  modified_base 17: mod_base = OTHER; note = 2'-O-methyladenosine-3'-phosphate
  modified_base 18: mod_base = OTHER; note = 2'-O-methyladenosine-3'-phosphate
  modified_base 19: mod_base = OTHER; note = 2'-O-methyluridine-3'-phosphate
  modified_base 20: mod_base = OTHER; note = 2'-O-methylguanosine-3'-phosphate
  modified_base 21: mod_base = OTHER; note = 2'-O-methyluridine-3'-phosphorothioate
  modified_base 22: mod_base = OTHER; note = 2'-O-methylguanosine-3'-phosphorothioate
  modified_base 23: mod_base = OTHER; note = 2'-O-methyluridine
aagtagtactcatttcaatgtgt

SEQ ID NO: 1239 - RNA, 23 nt, synthetic construct
  source 1..23: mol_type = other RNA
  modified_base 1: mod_base = OTHER; note = 2'-O-methyladenosine-3'-phosphorothioate
  modified_base 2: mod_base = OTHER; note = 2'-deoxy-2'-fluorocytidine-3'-phosphorothioate
  modified_base 3: mod_base = OTHER; note = 2'-O-methyladenosine-3'-phosphate
  modified_base 4: mod_base = OTHER; note = 2'-O-methyladenosine-3'-phosphate
  modified_base 5: mod_base = OTHER; note = 2'-O-methylcytidine-3'-phosphate
  modified_base 6: mod_base = OTHER; note = 2'-deoxy-2'-fluorocytidine-3'-phosphate
  modified_base 7: mod_base = OTHER; note = 2'-O-methylcytidine-3'-phosphate
  modified_base 8: mod_base = OTHER; note = 2'-deoxy-2'-fluoroadenosine-3'-phosphate
  modified_base 9: mod_base = OTHER; note = 2'-deoxy-2'-fluoroguanosine-3'-phosphate
  modified_base 10: mod_base = OTHER; note = 2'-O-methylcytidine-3'-phosphate
  modified_base 11: mod_base = OTHER; note = 2'-O-methylcytidine-3'-phosphate
  modified_base 12: mod_base = OTHER; note = 2'-O-methyladenosine-3'-phosphate
  modified_base 13: mod_base = OTHER; note = 2'-O-methylguanosine-3'-phosphate
  modified_base 14: mod_base = OTHER; note = 2'-deoxy-2'-fluorouridine-3'-phosphate
  modified_base 15: mod_base = OTHER; note = 2'-O-methyladenosine-3'-phosphate
  modified_base 16: mod_base = OTHER; note = 2'-deoxy-2'-fluoroguanosine-3'-phosphate
  modified_base 17: mod_base = OTHER; note = 2'-O-methyluridine-3'-phosphate
  modified_base 18: mod_base = OTHER; note = 2'-O-methyladenosine-3'-phosphate
  modified_base 19: mod_base = OTHER; note = 2'-O-methylcytidine-3'-phosphate
  modified_base 20: mod_base = OTHER; note = 2'-O-methyluridine-3'-phosphate
  modified_base 21: mod_base = OTHER; note = 2'-O-methylcytidine-3'-phosphorothioate
  modified_base 22: mod_base = OTHER; note = 2'-O-methyladenosine-3'-phosphorothioate
  modified_base 23: mod_base = OTHER; note = 2'-O-methyluridine
acaacccagccagtagtactcat

SEQ ID NO: 1240 - RNA, 23 nt, synthetic construct
  source 1..23: mol_type = other RNA
  modified_base 1: mod_base = OTHER; note = 2'-O-methyladenosine-3'-phosphorothioate
  modified_base 2: mod_base = OTHER; note = 2'-deoxy-2'-fluorouridine-3'-phosphorothioate
  modified_base 3: mod_base = OTHER; note = 2'-O-methyladenosine-3'-phosphate
  modified_base 4: mod_base = OTHER; note = 2'-O-methyladenosine-3'-phosphate
  modified_base 5: mod_base = OTHER; note = 2'-O-methyladenosine-3'-phosphate
  modified_base 6: mod_base = OTHER; note = 2'-deoxy-2'-fluorouridine-3'-phosphate
  modified_base 7: mod_base = OTHER; note = 2'-O-methylcytidine-3'-phosphate
  modified_base 8: mod_base = OTHER; note = 2'-deoxy-2'-fluorouridine-3'-phosphate
  modified_base 9: mod_base = OTHER; note = 2'-deoxy-2'-fluorouridine-3'-phosphate
  modified_base 10: mod_base = OTHER; note = 2'-O-methylcytidine-3'-phosphate
  modified_base 11: mod_base = OTHER; note = 2'-O-methylcytidine-3'-phosphate
  modified_base 12: mod_base = OTHER; note = 2'-O-methyladenosine-3'-phosphate
  modified_base 13: mod_base = OTHER; note = 2'-O-methyladenosine-3'-phosphate
  modified_base 14: mod_base = OTHER; note = 2'-deoxy-2'-fluorocytidine-3'-phosphate
  modified_base 15: mod_base = OTHER; note = 2'-O-methylcytidine-3'-phosphate
  modified_base 16: mod_base = OTHER; note = 2'-deoxy-2'-fluorocytidine-3'-phosphate
  modified_base 17: mod_base = OTHER; note = 2'-O-methyladenosine-3'-phosphate
  modified_base 18: mod_base = OTHER; note = 2'-O-methylguanosine-3'-phosphate
  modified_base 19: mod_base = OTHER; note = 2'-O-methylcytidine-3'-phosphate
  modified_base 20: mod_base = OTHER; note = 2'-O-methylcytidine-3'-phosphate
  modified_base 21: mod_base = OTHER; note = 2'-O-methyladenosine-3'-phosphorothioate
  modified_base 22: mod_base = OTHER; note = 2'-O-methylguanosine-3'-phosphorothioate
  modified_base 23: mod_base = OTHER; note = 2'-O-methyluridine
ataaatcttccaacccagccagt

SEQ ID NO: 1241 - RNA, 23 nt, synthetic construct
  source 1..23: mol_type = other RNA
  modified_base 1: mod_base = OTHER; note = 2'-O-methyladenosine-3'-phosphorothioate
  modified_base 2: mod_base = OTHER; note = 2'-deoxy-2'-fluoroadenosine-3'-phosphorothioate
  modified_base 3: mod_base = OTHER; note = 2'-O-methyladenosine-3'-phosphate
  modified_base 4: mod_base = OTHER; note = 2'-O-methylguanosine-3'-phosphate
  modified_base 5: mod_base = OTHER; note = 2'-O-methylguanosine-3'-phosphate
  modified_base 6: mod_base = OTHER; note = 2'-deoxy-2'-fluorocytidine-3'-phosphate
  modified_base 7: mod_base = OTHER; note = 2'-O-methylcytidine-3'-phosphate
  modified_base 8: mod_base = OTHER; note = 2'-deoxy-2'-fluorouridine-3'-phosphate
  modified_base 9: mod_base = OTHER; note = 2'-deoxy-2'-fluoroadenosine-3'-phosphate
  modified_base 10: mod_base = OTHER; note = 2'-O-methyladenosine-3'-phosphate
  modified_base 11: mod_base = OTHER; note = 2'-O-methyladenosine-3'-phosphate
  modified_base 12: mod_base = OTHER; note = 2'-O-methyluridine-3'-phosphate
  modified_base 13: mod_base = OTHER; note = 2'-O-methylcytidine-3'-phosphate
  modified_base 14: mod_base = OTHER; note = 2'-deoxy-2'-fluorouridine-3'-phosphate
  modified_base 15: mod_base = OTHER; note = 2'-O-methyluridine-3'-phosphate
  modified_base 16: mod_base = OTHER; note = 2'-deoxy-2'-fluorocytidine-3'-phosphate
  modified_base 17: mod_base = OTHER; note = 2'-O-methylcytidine-3'-phosphate
  modified_base 18: mod_base = OTHER; note = 2'-O-methyladenosine-3'-phosphate
  modified_base 19: mod_base = OTHER; note = 2'-O-methyladenosine-3'-phosphate
  modified_base 20: mod_base = OTHER; note = 2'-O-methylcytidine-3'-phosphate
  modified_base 21: mod_base = OTHER; note = 2'-O-methylcytidine-3'-phosphorothioate
  modified_base 22: mod_base = OTHER; note = 2'-O-methylcytidine-3'-phosphorothioate
  modified_base 23: mod_base = OTHER; note = 2'-O-methyladenosine
aaaggcctaaatcttccaaccca

SEQ ID NO: 1242 - RNA, 23 nt, synthetic construct
  source 1..23: mol_type = other RNA
  modified_base 1: mod_base = OTHER; note = 2'-O-methyladenosine-3'-phosphorothioate
  modified_base 2: mod_base = OTHER; note = 2'-deoxy-2'-fluoroadenosine-3'-phosphorothioate
  modified_base 3: mod_base = OTHER; note = 2'-O-methylguanosine-3'-phosphate
  modified_base 4: mod_base = OTHER; note = 2'-O-methylguanosine-3'-phosphate
  modified_base 5: mod_base = OTHER; note = 2'-O-methyluridine-3'-phosphate
  modified_base 6: mod_base = OTHER; note = 2'-deoxy-2'-fluorouridine-3'-phosphate
  modified_base 7: mod_base = OTHER; note = 2'-O-methylcytidine-3'-phosphate
  modified_base 8: mod_base = OTHER; note = 2'-deoxy-2'-fluorouridine-3'-phosphate
  modified_base 9: mod_base = OTHER; note = 2'-deoxy-2'-fluoroguanosine-3'-phosphate
  modified_base 10: mod_base = OTHER; note = 2'-O-methyladenosine-3'-phosphate
  modified_base 11: mod_base = OTHER; note = 2'-O-methyladenosine-3'-phosphate
  modified_base 12: mod_base = OTHER; note = 2'-O-methylguanosine-3'-phosphate
  modified_base 13: mod_base = OTHER; note = 2'-O-methylguanosine-3'-phosphate
  modified_base 14: mod_base = OTHER; note = 2'-deoxy-2'-fluorocytidine-3'-phosphate
  modified_base 15: mod_base = OTHER; note = 2'-O-methylcytidine-3'-phosphate
  modified_base 16: mod_base = OTHER; note = 2'-deoxy-2'-fluorouridine-3'-phosphate
  modified_base 17: mod_base = OTHER; note = 2'-O-methyladenosine-3'-phosphate
  modified_base 18: mod_base = OTHER; note = 2'-O-methyladenosine-3'-phosphate
  modified_base 19: mod_base = OTHER; note = 2'-O-methyladenosine-3'-phosphate
  modified_base 20: mod_base = OTHER; note = 2'-O-methyluridine-3'-phosphate
  modified_base 21: mod_base = OTHER; note = 2'-O-methylcytidine-3'-phosphorothioate
  modified_base 22: mod_base = OTHER; note = 2'-O-methyluridine-3'-phosphorothioate
  modified_base 23: mod_base = OTHER; note = 2'-O-methyluridine
aaggttctgaaggcctaaatctt

SEQ ID NO: 1243 - RNA, 23 nt, synthetic construct
  source 1..23: mol_type = other RNA
  modified_base 1: mod_base = OTHER; note = 2'-O-methyladenosine-3'-phosphorothioate
  modified_base 2: mod_base = OTHER; note = 2'-deoxy-2'-fluoroguanosine-3'-phosphorothioate
  modified_base 3: mod_base = OTHER; note = 2'-O-methyluridine-3'-phosphate
  modified_base 4: mod_base = OTHER; note = 2'-O-methyladenosine-3'-phosphate
  modified_base 5: mod_base = OTHER; note = 2'-O-methyladenosine-3'-phosphate
  modified_base 6: mod_base = OTHER; note = 2'-deoxy-2'-fluoroadenosine-3'-phosphate
  modified_base 7: mod_base = OTHER; note = 2'-O-methyladenosine-3'-phosphate
  modified_base 8: mod_base = OTHER; note = 2'-deoxy-2'-fluorouridine-3'-phosphate
  modified_base 9: mod_base = OTHER; note = 2'-deoxy-2'-fluoroguanosine-3'-phosphate
  modified_base 10: mod_base = OTHER; note = 2'-O-methyladenosine-3'-phosphate
  modified_base 11: mod_base = OTHER; note = 2'-O-methylguanosine-3'-phosphate
  modified_base 12: mod_base = OTHER; note = 2'-O-methylguanosine-3'-phosphate
  modified_base 13: mod_base = OTHER; note = 2'-O-methyluridine-3'-phosphate
  modified_base 14: mod_base = OTHER; note = 2'-deoxy-2'-fluorouridine-3'-phosphate
  modified_base 15: mod_base = OTHER; note = 2'-O-methylcytidine-3'-phosphate
  modified_base 16: mod_base = OTHER; note = 2'-deoxy-2'-fluorouridine-3'-phosphate
  modified_base 17: mod_base = OTHER; note = 2'-O-methylguanosine-3'-phosphate
  modified_base 18: mod_base = OTHER; note = 2'-O-methyladenosine-3'-phosphate
  modified_base 19: mod_base = OTHER; note = 2'-O-methyladenosine-3'-phosphate
  modified_base 20: mod_base = OTHER; note = 2'-O-methylguanosine-3'-phosphate
  modified_base 21: mod_base = OTHER; note = 2'-O-methylguanosine-3'-phosphorothioate
  modified_base 22: mod_base = OTHER; note = 2'-O-methylcytidine-3'-phosphorothioate
  modified_base 23: mod_base = OTHER; note = 2'-O-methylcytidine
agtaaaatgaggttctgaaggcc

SEQ ID NO: 1244 - RNA, 23 nt, synthetic construct
  source 1..23: mol_type = other RNA
  modified_base 1: mod_base = OTHER; note = 2'-O-methyladenosine-3'-phosphorothioate
  modified_base 2: mod_base = OTHER; note = 2'-deoxy-2'-fluorouridine-3'-phosphorothioate
  modified_base 3: mod_base = OTHER; note = 2'-O-methylcytidine-3'-phosphate
  modified_base 4: mod_base = OTHER; note = 2'-O-methyladenosine-3'-phosphate
  modified_base 5: mod_base = OTHER; note = 2'-O-methyladenosine-3'-phosphate
  modified_base 6: mod_base = OTHER; note = 2'-deoxy-2'-fluoroguanosine-3'-phosphate
  modified_base 7: mod_base = OTHER; note = 2'-O-methylguanosine-3'-phosphate
  modified_base 8: mod_base = OTHER; note = 2'-deoxy-2'-fluoroguanosine-3'-phosphate
  modified_base 9: mod_base = OTHER; note = 2'-deoxy-2'-fluorouridine-3'-phosphate
  modified_base 10: mod_base = OTHER; note = 2'-O-methyladenosine-3'-phosphate
  modified_base 11: mod_base = OTHER; note = 2'-O-methyladenosine-3'-phosphate
  modified_base 12: mod_base = OTHER; note = 2'-O-methyladenosine-3'-phosphate
  modified_base 13: mod_base = OTHER; note = 2'-O-methyladenosine-3'-phosphate
  modified_base 14: mod_base = OTHER; note = 2'-deoxy-2'-fluorouridine-3'-phosphate
  modified_base 15: mod_base = OTHER; note = 2'-O-methylguanosine-3'-phosphate
  modified_base 16: mod_base = OTHER; note = 2'-deoxy-2'-fluoroadenosine-3'-phosphate
  modified_base 17: mod_base = OTHER; note = 2'-O-methylguanosine-3'-phosphate
  modified_base 18: mod_base = OTHER; note = 2'-O-methylguanosine-3'-phosphate
  modified_base 19: mod_base = OTHER; note = 2'-O-methyluridine-3'-phosphate
  modified_base 20: mod_base = OTHER; note = 2'-O-methyluridine-3'-phosphate
  modified_base 21: mod_base = OTHER; note = 2'-O-methylcytidine-3'-phosphorothioate
  modified_base 22: mod_base = OTHER; note = 2'-O-methyluridine-3'-phosphorothioate
  modified_base 23: mod_base = OTHER; note = 2'-O-methylguanosine
atcaagggtaaaatgaggttctg

SEQ ID NO: 1245 - RNA, 23 nt, synthetic construct
  source 1..23: mol_type = other RNA
  modified_base 1: mod_base = OTHER; note = 2'-O-methyladenosine-3'-phosphorothioate
  modified_base 2: mod_base = OTHER; note = 2'-deoxy-2'-fluorouridine-3'-phosphorothioate
  modified_base 3: mod_base = OTHER; note = 2'-O-methyluridine-3'-phosphate
  modified_base 4: mod_base = OTHER; note = 2'-O-methyladenosine-3'-phosphate
  modified_base 5: mod_base = OTHER; note = 2'-O-methylcytidine-3'-phosphate
  modified_base 6: mod_base = OTHER; note = 2'-deoxy-2'-fluorocytidine-3'-phosphate
  modified_base 7: mod_base = OTHER; note = 2'-O-methyladenosine-3'-phosphate
  modified_base 8: mod_base = OTHER; note = 2'-deoxy-2'-fluorouridine-3'-phosphate
  modified_base 9: mod_base = OTHER; note = 2'-deoxy-2'-fluorocytidine-3'-phosphate
  modified_base 10: mod_base = OTHER; note = 2'-O-methyladenosine-3'-phosphate
  modified_base 11: mod_base = OTHER; note = 2'-O-methyladenosine-3'-phosphate
  modified_base 12: mod_base = OTHER; note = 2'-O-methylguanosine-3'-phosphate
  modified_base 13: mod_base = OTHER; note = 2'-O-methylguanosine-3'-phosphate
  modified_base 14: mod_base = OTHER; note = 2'-deoxy-2'-fluoroguanosine-3'-phosphate
  modified_base 15: mod_base = OTHER; note = 2'-O-methyluridine-3'-phosphate
  modified_base 16: mod_base = OTHER; note = 2'-deoxy-2'-fluoroadenosine-3'-phosphate
  modified_base 17: mod_base = OTHER; note = 2'-O-methyladenosine-3'-phosphate
  modified_base 18: mod_base = OTHER; note = 2'-O-methyladenosine-3'-phosphate
  modified_base 19: mod_base = OTHER; note = 2'-O-methyladenosine-3'-phosphate
  modified_base 20: mod_base = OTHER; note = 2'-O-methyluridine-3'-phosphate
  modified_base 21: mod_base = OTHER; note = 2'-O-methylguanosine-3'-phosphorothioate
  modified_base 22: mod_base = OTHER; note = 2'-O-methyladenosine-3'-phosphorothioate
  modified_base 23: mod_base = OTHER; note = 2'-O-methylguanosine
attaccatcaagggtaaaatgag

SEQ ID NO: 1246 - RNA, 23 nt, synthetic construct
  source 1..23: mol_type = other RNA
  modified_base 1: mod_base = OTHER; note = 2'-O-methyladenosine-3'-phosphorothioate
  modified_base 2: mod_base = OTHER; note = 2'-deoxy-2'-fluoroadenosine-3'-phosphorothioate
  modified_base 3: mod_base = OTHER; note = 2'-O-methyladenosine-3'-phosphate
  modified_base 4: mod_base = OTHER; note = 2'-O-methylguanosine-3'-phosphate
  modified_base 5: mod_base = OTHER; note = 2'-O-methylcytidine-3'-phosphate
  modified_base 6: mod_base = OTHER; note = 2'-deoxy-2'-fluorouridine-3'-phosphate
  modified_base 7: mod_base = OTHER; note = 2'-O-methyladenosine-3'-phosphate
  modified_base 8: mod_base = OTHER; note = 2'-deoxy-2'-fluorouridine-3'-phosphate
  modified_base 9: mod_base = OTHER; note = 2'-deoxy-2'-fluorouridine-3'-phosphate
  modified_base 10: mod_base = OTHER; note = 2'-O-methyladenosine-3'-phosphate
  modified_base 11: mod_base = OTHER; note = 2'-O-methylcytidine-3'-phosphate
  modified_base 12: mod_base = OTHER; note = 2'-O-methylcytidine-3'-phosphate
  modified_base 13: mod_base = OTHER; note = 2'-O-methyladenosine-3'-phosphate
  modified_base 14: mod_base = OTHER; note = 2'-deoxy-2'-fluorouridine-3'-phosphate
  modified_base 15: mod_base = OTHER; note = 2'-O-methylcytidine-3'-phosphate
  modified_base 16: mod_base = OTHER; note = 2'-deoxy-2'-fluoroadenosine-3'-phosphate
  modified_base 17: mod_base = OTHER; note = 2'-O-methyladenosine-3'-phosphate
  modified_base 18: mod_base = OTHER; note = 2'-O-methylguanosine-3'-phosphate
  modified_base 19: mod_base = OTHER; note = 2'-O-methylguanosine-3'-phosphate
  modified_base 20: mod_base = OTHER; note = 2'-O-methylguanosine-3'-phosphate
  modified_base 21: mod_base = OTHER; note = 2'-O-methyluridine-3'-phosphorothioate
  modified_base 22: mod_base = OTHER; note = 2'-O-methyladenosine-3'-phosphorothioate
  modified_base 23: mod_base = OTHER; note = 2'-O-methyladenosine
aaagctattaccatcaagggtaa

SEQ ID NO: 1247 - RNA, 23 nt, synthetic construct
  source 1..23: mol_type = other RNA
  modified_base 1: mod_base = OTHER; note = 2'-O-methyladenosine-3'-phosphorothioate
  modified_base 2: mod_base = OTHER; note = 2'-deoxy-2'-fluorocytidine-3'-phosphorothioate
  modified_base 3: mod_base = OTHER; note = 2'-O-methyluridine-3'-phosphate
  modified_base 4: mod_base = OTHER; note = 2'-O-methyluridine-3'-phosphate
  modified_base 5: mod_base = OTHER; note = 2'-O-methylguanosine-3'-phosphate
  modified_base 6: mod_base = OTHER; note = 2'-deoxy-2'-fluorouridine-3'-phosphate
  modified_base 7: mod_base = OTHER; note = 2'-O-methyladenosine-3'-phosphate
  modified_base 8: mod_base = OTHER; note = 2'-deoxy-2'-fluoroguanosine-3'-phosphate
  modified_base 9: mod_base = OTHER; note = 2'-deoxy-2'-fluoroadenosine-3'-phosphate
  modified_base 10: mod_base = OTHER; note = 2'-O-methyladenosine-3'-phosphate
  modified_base 11: mod_base = OTHER; note = 2'-O-methylguanosine-3'-phosphate
  modified_base 12: mod_base = OTHER; note = 2'-O-methylcytidine-3'-phosphate
  modified_base 13: mod_base = OTHER; note = 2'-O-methyluridine-3'-phosphate
  modified_base 14: mod_base = OTHER; note = 2'-deoxy-2'-fluoroadenosine-3'-phosphate
  modified_base 15: mod_base = OTHER; note = 2'-O-methyluridine-3'-phosphate
  modified_base 16: mod_base = OTHER; note = 2'-deoxy-2'-fluorouridine-3'-phosphate
  modified_base 17: mod_base = OTHER; note = 2'-O-methyladenosine-3'-phosphate
  modified_base 18: mod_base = OTHER; note = 2'-O-methylcytidine-3'-phosphate
  modified_base 19: mod_base = OTHER; note = 2'-O-methylcytidine-3'-phosphate
  modified_base 20: mod_base = OTHER; note = 2'-O-methyladenosine-3'-phosphate
  modified_base 21: mod_base = OTHER; note = 2'-O-methyluridine-3'-phosphorothioate
  modified_base 22: mod_base = OTHER; note = 2'-O-methylcytidine-3'-phosphorothioate
  modified_base 23: mod_base = OTHER; note = 2'-O-methyladenosine
acttgtagaagctattaccatca

SEQ ID NO: 1248 - RNA, 23 nt, synthetic construct
  source 1..23: mol_type = other RNA
  modified_base 1: mod_base = OTHER; note = 2'-O-methyladenosine-3'-phosphorothioate
  modified_base 2: mod_base = OTHER; note = 2'-deoxy-2'-fluorouridine-3'-phosphorothioate
  modified_base 3: mod_base = OTHER; note = 2'-O-methylguanosine-3'-phosphate
  modified_base 4: mod_base = OTHER; note = 2'-O-methyladenosine-3'-phosphate
  modified_base 5: mod_base = OTHER; note = 2'-O-methyluridine-3'-phosphate
  modified_base 6: mod_base = OTHER; note = 2'-deoxy-2'-fluoroguanosine-3'-phosphate
  modified_base 7: mod_base = OTHER; note = 2'-O-methyladenosine-3'-phosphate
  modified_base 8: mod_base = OTHER; note = 2'-deoxy-2'-fluorouridine-3'-phosphate
  modified_base 9: mod_base = OTHER; note = 2'-deoxy-2'-fluorocytidine-3'-phosphate
  modified_base 10: mod_base = OTHER; note = 2'-O-methyluridine-3'-phosphate
  modified_base 11: mod_base = OTHER; note = 2'-O-methyluridine-3'-phosphate
  modified_base 12: mod_base = OTHER; note = 2'-O-methylguanosine-3'-phosphate
  modified_base 13: mod_base = OTHER; note = 2'-O-methyluridine-3'-phosphate
  modified_base 14: mod_base = OTHER; note = 2'-deoxy-2'-fluoroadenosine-3'-phosphate
  modified_base 15: mod_base = OTHER; note = 2'-O-methylguanosine-3'-phosphate
  modified_base 16: mod_base = OTHER; note = 2'-deoxy-2'-fluoroadenosine-3'-phosphate
  modified_base 17: mod_base = OTHER; note = 2'-O-methyladenosine-3'-phosphate
  modified_base 18: mod_base = OTHER; note = 2'-O-methylguanosine-3'-phosphate
  modified_base 19: mod_base = OTHER; note = 2'-O-methylcytidine-3'-phosphate
  modified_base 20: mod_base = OTHER; note = 2'-O-methyluridine-3'-phosphate
  modified_base 21: mod_base = OTHER; note = 2'-O-methyladenosine-3'-phosphorothioate
  modified_base 22: mod_base = OTHER; note = 2'-O-methyluridine-3'-phosphorothioate
  modified_base 23: mod_base = OTHER; note = 2'-O-methyluridine
atgatgatcttgtagaagctatt

SEQ ID NO: 1249 - RNA, 23 nt, synthetic construct
  source 1..23: mol_type = other RNA
  modified_base 1: mod_base = OTHER; note = 2'-O-methyladenosine-3'-phosphorothioate
  modified_base 2: mod_base = OTHER; note = 2'-deoxy-2'-fluorocytidine-3'-phosphorothioate
  modified_base 3: mod_base = OTHER; note = 2'-O-methyluridine-3'-phosphate
  modified_base 4: mod_base = OTHER; note = 2'-O-methyluridine-3'-phosphate
  modified_base 5: mod_base = OTHER; note = 2'-O-methylcytidine-3'-phosphate
  modified_base 6: mod_base = OTHER; note = 2'-deoxy-2'-fluoroadenosine-3'-phosphate
  modified_base 7: mod_base = OTHER; note = 2'-O-methyluridine-3'-phosphate
  modified_base 8: mod_base = OTHER; note = 2'-deoxy-2'-fluorouridine-3'-phosphate
  modified_base 9: mod_base = OTHER; note = 2'-deoxy-2'-fluoroguanosine-3'-phosphate
  modified_base 10: mod_base = OTHER; note = 2'-O-methylcytidine-3'-phosphate
  modified_base 11: mod_base = OTHER; note = 2'-O-methyluridine-3'-phosphate
  modified_base 12: mod_base = OTHER; note = 2'-O-methylguanosine-3'-phosphate
  modified_base 13: mod_base = OTHER; note = 2'-O-methyladenosine-3'-phosphate
  modified_base 14: mod_base = OTHER; note = 2'-deoxy-2'-fluorouridine-3'-phosphate
  modified_base 15: mod_base = OTHER; note = 2'-O-methylguanosine-3'-phosphate
  modified_base 16: mod_base = OTHER; note = 2'-deoxy-2'-fluoroadenosine-3'-phosphate
  modified_base 17: mod_base = OTHER; note = 2'-O-methyluridine-3'-phosphate
  modified_base 18: mod_base = OTHER; note = 2'-O-methylcytidine-3'-phosphate
  modified_base 19: mod_base = OTHER; note = 2'-O-methyluridine-3'-phosphate
  modified_base 20: mod_base = OTHER; note = 2'-O-methyluridine-3'-phosphate
  modified_base 21: mod_base = OTHER; note = 2'-O-methylguanosine-3'-phosphorothioate
  modified_base 22: mod_base = OTHER; note = 2'-O-methyluridine-3'-phosphorothioate
  modified_base 23: mod_base = OTHER; note = 2'-O-methyladenosine
acttcattgctgatgatcttgta

SEQ ID NO: 1250 - RNA, 23 nt, synthetic construct
  source 1..23: mol_type = other RNA
  modified_base 1: mod_base = OTHER; note = 2'-O-methyladenosine-3'-phosphorothioate
  modified_base 2: mod_base = OTHER; note = 2'-deoxy-2'-fluorocytidine-3'-phosphorothioate
  modified_base 3: mod_base = OTHER; note = 2'-O-methyluridine-3'-phosphate
  modified_base 4: mod_base = OTHER; note = 2'-O-methylguanosine-3'-phosphate
  modified_base 5: mod_base = OTHER; note = 2'-O-methyluridine-3'-phosphate
  modified_base 6: mod_base = OTHER; note = 2'-deoxy-2'-fluoroadenosine-3'-phosphate
  modified_base 7: mod_base = OTHER; note = 2'-O-methyladenosine-3'-phosphate
  modified_base 8: mod_base = OTHER; note = 2'-deoxy-2'-fluorocytidine-3'-phosphate
  modified_base 9: mod_base = OTHER; note = 2'-deoxy-2'-fluorocytidine-3'-phosphate
  modified_base 10: mod_base = OTHER; note = 2'-O-methyluridine-3'-phosphate
  modified_base 11: mod_base = OTHER; note = 2'-O-methyluridine-3'-phosphate
  modified_base 12: mod_base = OTHER; note = 2'-O-methylcytidine-3'-phosphate
  modified_base 13: mod_base = OTHER; note = 2'-O-methyluridine-3'-phosphate
  modified_base 14: mod_base = OTHER; note = 2'-deoxy-2'-fluorouridine-3'-phosphate
  modified_base 15: mod_base = OTHER; note = 2'-O-methylcytidine-3'-phosphate
  modified_base 16: mod_base = OTHER; note = 2'-deoxy-2'-fluoroadenosine-3'-phosphate
  modified_base 17: mod_base = OTHER; note = 2'-O-methyluridine-3'-phosphate
  modified_base 18: mod_base = OTHER; note = 2'-O-methyluridine-3'-phosphate
  modified_base 19: mod_base = OTHER; note = 2'-O-methylguanosine-3'-phosphate
  modified_base 20: mod_base = OTHER; note = 2'-O-methylcytidine-3'-phosphate
  modified_base 21: mod_base = OTHER; note = 2'-O-methyluridine-3'-phosphorothioate
  modified_base 22: mod_base = OTHER; note = 2'-O-methylguanosine-3'-phosphorothioate
  modified_base 23: mod_base = OTHER; note = 2'-O-methyladenosine
actgtaaccttcttcattgctga

SEQ ID NO: 1251 - RNA, 23 nt, synthetic construct
  source 1..23: mol_type = other RNA
  modified_base 1: mod_base = OTHER; note = 2'-O-methyladenosine-3'-phosphorothioate
  modified_base 2: mod_base = OTHER; note = 2'-deoxy-2'-fluorocytidine-3'-phosphorothioate
  modified_base 3: mod_base = OTHER; note = 2'-O-methyladenosine-3'-phosphate
  modified_base 4: mod_base = OTHER; note = 2'-O-methyladenosine-3'-phosphate
  modified_base 5: mod_base = OTHER; note = 2'-O-methyladenosine-3'-phosphate
  modified_base 6: mod_base = OTHER; note = 2'-deoxy-2'-fluorouridine-3'-phosphate
  modified_base 7: mod_base = OTHER; note = 2'-O-methylguanosine-3'-phosphate
  modified_base 8: mod_base = OTHER; note = 2'-deoxy-2'-fluorouridine-3'-phosphate
  modified_base 9: mod_base = OTHER; note = 2'-deoxy-2'-fluoroguanosine-3'-phosphate
  modified_base 10: mod_base = OTHER; note = 2'-O-methyluridine-3'-phosphate
  modified_base 11: mod_base = OTHER; note = 2'-O-methylcytidine-3'-phosphate
  modified_base 12: mod_base = OTHER; note = 2'-O-methyluridine-3'-phosphate
  modified_base 13: mod_base = OTHER; note = 2'-O-methylguanosine-3'-phosphate
  modified_base 14: mod_base = OTHER; note = 2'-deoxy-2'-fluorouridine-3'-phosphate
  modified_base 15: mod_base = OTHER; note = 2'-O-methyladenosine-3'-phosphate
  modified_base 16: mod_base = OTHER; note = 2'-deoxy-2'-fluoroadenosine-3'-phosphate
  modified_base 17: mod_base = OTHER; note = 2'-O-methylcytidine-3'-phosphate
  modified_base 18: mod_base = OTHER; note = 2'-O-methylcytidine-3'-phosphate
  modified_base 19: mod_base = OTHER; note = 2'-O-methyluridine-3'-phosphate
  modified_base 20: mod_base = OTHER; note = 2'-O-methyluridine-3'-phosphate
  modified_base 21: mod_base = OTHER; note = 2'-O-methylcytidine-3'-phosphorothioate
  modified_base 22: mod_base = OTHER; note = 2'-O-methyluridine-3'-phosphorothioate
  modified_base 23: mod_base = OTHER; note = 2'-O-methyluridine
acaaatgtgtctgtaaccttctt

SEQ ID NO: 1252 - RNA, 23 nt, synthetic construct
  source 1..23: mol_type = other RNA
  modified_base 1: mod_base = OTHER; note = 2'-O-methyladenosine-3'-phosphorothioate
  modified_base 2: mod_base = OTHER; note = 2'-deoxy-2'-fluoroguanosine-3'-phosphorothioate
  modified_base 3: mod_base = OTHER; note = 2'-O-methyladenosine-3'-phosphate
  modified_base 4: mod_base = OTHER; note = 2'-O-methyladenosine-3'-phosphate
  modified_base 5: mod_base = OTHER; note = 2'-O-methyladenosine-3'-phosphate
  modified_base 6: mod_base = OTHER; note = 2'-deoxy-2'-fluorouridine-3'-phosphate
  modified_base 7: mod_base = OTHER; note = 2'-O-methyladenosine-3'-phosphate
  modified_base 8: mod_base = OTHER; note = 2'-deoxy-2'-fluoroguanosine-3'-phosphate
  modified_base 9: mod_base = OTHER; note = 2'-deoxy-2'-fluorocytidine-3'-phosphate
  modified_base 10: mod_base = OTHER; note = 2'-O-methyladenosine-3'-phosphate
  modified_base 11: mod_base = OTHER; note = 2'-O-methyladenosine-3'-phosphate
  modified_base 12: mod_base = OTHER; note = 2'-O-methyladenosine-3'-phosphate
  modified_base 13: mod_base = OTHER; note = 2'-O-methyluridine-3'-phosphate
  modified_base 14: mod_base = OTHER; note = 2'-deoxy-2'-fluoroguanosine-3'-phosphate
  modified_base 15: mod_base = OTHER; note = 2'-O-methyluridine-3'-phosphate
  modified_base 16: mod_base = OTHER; note = 2'-deoxy-2'-fluoroguanosine-3'-phosphate
  modified_base 17: mod_base = OTHER; note = 2'-O-methyluridine-3'-phosphate
  modified_base 18: mod_base = OTHER; note = 2'-O-methylcytidine-3'-phosphate
  modified_base 19: mod_base = OTHER; note = 2'-O-methyluridine-3'-phosphate
  modified_base 20: mod_base = OTHER; note = 2'-O-methylguanosine-3'-phosphate
  modified_base 21: mod_base = OTHER; note = 2'-O-methyluridine-3'-phosphorothioate
  modified_base 22: mod_base = OTHER; note = 2'-O-methyladenosine-3'-phosphorothioate
  modified_base 23: mod_base = OTHER; note = 2'-O-methyladenosine
agaaatagcaaatgtgtctgtaa

SEQ ID NO: 1253 - RNA, 23 nt, synthetic construct
  source 1..23: mol_type = other RNA
  modified_base 1: mod_base = OTHER; note = 2'-O-methyladenosine-3'-phosphorothioate
  modified_base 2: mod_base = OTHER; note = 2'-deoxy-2'-fluorocytidine-3'-phosphorothioate
  modified_base 3: mod_base = OTHER; note = 2'-O-methyluridine-3'-phosphate
  modified_base 4: mod_base = OTHER; note = 2'-O-methyladenosine-3'-phosphate
  modified_base 5: mod_base = OTHER; note = 2'-O-methyluridine-3'-phosphate
  modified_base 6: mod_base = OTHER; note = 2'-deoxy-2'-fluorouridine-3'-phosphate
  modified_base 7: mod_base = OTHER; note = 2'-O-methyluridine-3'-phosphate
  modified_base 8: mod_base = OTHER; note = 2'-deoxy-2'-fluoroguanosine-3'-phosphate
  modified_base 9: mod_base = OTHER; note = 2'-deoxy-2'-fluoroguanosine-3'-phosphate
  modified_base 10: mod_base = OTHER; note = 2'-O-methyladenosine-3'-phosphate
  modified_base 11: mod_base = OTHER; note = 2'-O-methyladenosine-3'-phosphate
  modified_base 12: mod_base = OTHER; note = 2'-O-methyladenosine-3'-phosphate
  modified_base 13: mod_base = OTHER; note = 2'-O-methyluridine-3'-phosphate
  modified_base 14: mod_base = OTHER; note = 2'-deoxy-2'-fluoroadenosine-3'-phosphate
  modified_base 15: mod_base = OTHER; note = 2'-O-methylguanosine-3'-phosphate
  modified_base 16: mod_base = OTHER; note = 2'-deoxy-2'-fluorocytidine-3'-phosphate
  modified_base 17: mod_base = OTHER; note = 2'-O-methyladenosine-3'-phosphate
  modified_base 18: mod_base = OTHER; note = 2'-O-methyladenosine-3'-phosphate
  modified_base 19: mod_base = OTHER; note = 2'-O-methyladenosine-3'-phosphate
  modified_base 20: mod_base = OTHER; note = 2'-O-methyluridine-3'-phosphate
  modified_base 21: mod_base = OTHER; note = 2'-O-methylguanosine-3'-phosphorothioate
  modified_base 22: mod_base = OTHER; note = 2'-O-methyluridine-3'-phosphorothioate
  modified_base 23: mod_base = OTHER; note = 2'-O-methylguanosine
actatttggaaatagcaaatgtg

SEQ ID NO: 1254 - RNA, 23 nt, synthetic construct
  source 1..23: mol_type = other RNA
  modified_base 1: mod_base = OTHER; note = 2'-O-methyladenosine-3'-phosphorothioate
  modified_base 2: mod_base = OTHER; note = 2'-deoxy-2'-fluorouridine-3'-phosphorothioate
  modified_base 3: mod_base = OTHER; note = 2'-O-methyluridine-3'-phosphate
  modified_base 4: mod_base = OTHER; note = 2'-O-methyluridine-3'-phosphate
  modified_base 5: mod_base = OTHER; note = 2'-O-methylguanosine-3'-phosphate
  modified_base 6: mod_base = OTHER; note = 2'-deoxy-2'-fluorouridine-3'-phosphate
  modified_base 7: mod_base = OTHER; note = 2'-O-methyladenosine-3'-phosphate
  modified_base 8: mod_base = OTHER; note = 2'-deoxy-2'-fluoroadenosine-3'-phosphate
  modified_base 9: mod_base = OTHER; note = 2'-deoxy-2'-fluorouridine-3'-phosphate
  modified_base 10: mod_base = OTHER; note = 2'-O-methyladenosine-3'-phosphate
  modified_base 11: mod_base = OTHER; note = 2'-O-methyladenosine-3'-phosphate
  modified_base 12: mod_base = OTHER; note = 2'-O-methyladenosine-3'-phosphate
  modified_base 13: mod_base = OTHER; note = 2'-O-methyluridine-3'-phosphate
  modified_base 14: mod_base = OTHER; note = 2'-deoxy-2'-fluoroguanosine-3'-phosphate
  modified_base 15: mod_base = OTHER; note = 2'-O-methyluridine-3'-phosphate
  modified_base 16: mod_base = OTHER; note = 2'-deoxy-2'-fluoroguanosine-3'-phosphate
  modified_base 17: mod_base = OTHER; note = 2'-O-methylcytidine-3'-phosphate
  modified_base 18: mod_base = OTHER; note = 2'-O-methyladenosine-3'-phosphate
  modified_base 19: mod_base = OTHER; note = 2'-O-methylguanosine-3'-phosphate
  modified_base 20: mod_base = OTHER; note = 2'-O-methyluridine-3'-phosphate
  modified_base 21: mod_base = OTHER; note = 2'-O-methylcytidine-3'-phosphorothioate
  modified_base 22: mod_base = OTHER; note = 2'-O-methyluridine-3'-phosphorothioate
  modified_base 23: mod_base = OTHER; note = 2'-O-methyluridine
atttgtaataaatgtgcagtctt

SEQ ID NO: 1255 - RNA, 23 nt, synthetic construct
  source 1..23: mol_type = other RNA
  modified_base 1: mod_base = OTHER; note = 2'-O-methyladenosine-3'-phosphorothioate
  modified_base 2: mod_base = OTHER; note = 2'-deoxy-2'-fluoroguanosine-3'-phosphorothioate
  modified_base 3: mod_base = OTHER; note = 2'-O-methyluridine-3'-phosphate
  modified_base 4: mod_base = OTHER; note = 2'-O-methylguanosine-3'-phosphate
  modified_base 5: mod_base = OTHER; note = 2'-O-methylcytidine-3'-phosphate
  modified_base 6: mod_base = OTHER; note = 2'-deoxy-2'-fluorocytidine-3'-phosphate
  modified_base 7: mod_base = OTHER; note = 2'-O-methyluridine-3'-phosphate
  modified_base 8: mod_base = OTHER; note = 2'-deoxy-2'-fluorouridine-3'-phosphate
  modified_base 9: mod_base = OTHER; note = 2'-deoxy-2'-fluorouridine-3'-phosphate
  modified_base 10: mod_base = OTHER; note = 2'-O-methyluridine-3'-phosphate
  modified_base 11: mod_base = OTHER; note = 2'-O-methylguanosine-3'-phosphate
  modified_base 12: mod_base = OTHER; note = 2'-O-methyluridine-3'-phosphate
  modified_base 13: mod_base = OTHER; note = 2'-O-methyladenosine-3'-phosphate
  modified_base 14: mod_base = OTHER; note = 2'-deoxy-2'-fluoroadenosine-3'-phosphate
  modified_base 15: mod_base = OTHER; note = 2'-O-methyluridine-3'-phosphate
  modified_base 16: mod_base = OTHER; note = 2'-deoxy-2'-fluoroadenosine-3'-phosphate
  modified_base 17: mod_base = OTHER; note = 2'-O-methyladenosine-3'-phosphate
  modified_base 18: mod_base = OTHER; note = 2'-O-methyladenosine-3'-phosphate
  modified_base 19: mod_base = OTHER; note = 2'-O-methyluridine-3'-phosphate
  modified_base 20: mod_base = OTHER; note = 2'-O-methylguanosine-3'-phosphate
  modified_base 21: mod_base = OTHER; note = 2'-O-methyluridine-3'-phosphorothioate
  modified_base 22: mod_base = OTHER; note = 2'-O-methylguanosine-3'-phosphorothioate
  modified_base 23: mod_base = OTHER; note = 2'-O-methylcytidine
agtgccttttgtaataaatgtgc

SEQ ID NO: 1256 - RNA, 23 nt, synthetic construct
  source 1..23: mol_type = other RNA
  modified_base 1: mod_base = OTHER; note = 2'-O-methyladenosine-3'-phosphorothioate
  modified_base 2: mod_base = OTHER; note = 2'-deoxy-2'-fluorouridine-3'-phosphorothioate
  modified_base 3: mod_base = OTHER; note = 2'-O-methyluridine-3'-phosphate
  modified_base 4: mod_base = OTHER; note = 2'-O-methylcytidine-3'-phosphate
  modified_base 5: mod_base = OTHER; note = 2'-O-methylcytidine-3'-phosphate
  modified_base 6: mod_base = OTHER; note = 2'-deoxy-2'-fluorocytidine-3'-phosphate
  modified_base 7: mod_base = OTHER; note = 2'-O-methyladenosine-3'-phosphate
  modified_base 8: mod_base = OTHER; note = 2'-deoxy-2'-fluoroguanosine-3'-phosphate
  modified_base 9: mod_base = OTHER; note = 2'-deoxy-2'-fluoroguanosine-3'-phosphate
  modified_base 10: mod_base = OTHER; note = 2'-O-methyluridine-3'-phosphate
  modified_base 11: mod_base = OTHER; note = 2'-O-methylguanosine-3'-phosphate
  modified_base 12: mod_base = OTHER; note = 2'-O-methylcytidine-3'-phosphate
  modified_base 13: mod_base = OTHER; note = 2'-O-methylcytidine-3'-phosphate
  modified_base 14: mod_base = OTHER; note = 2'-deoxy-2'-fluorouridine-3'-phosphate
  modified_base 15: mod_base = OTHER; note = 2'-O-methyluridine-3'-phosphate
  modified_base 16: mod_base = OTHER; note = 2'-deoxy-2'-fluorouridine-3'-phosphate
  modified_base 17: mod_base = OTHER; note = 2'-O-methyluridine-3'-phosphate
  modified_base 18: mod_base = OTHER; note = 2'-O-methylguanosine-3'-phosphate
  modified_base 19: mod_base = OTHER; note = 2'-O-methyluridine-3'-phosphate
  modified_base 20: mod_base = OTHER; note = 2'-O-methyladenosine-3'-phosphate
  modified_base 21: mod_base = OTHER; note = 2'-O-methyladenosine-3'-phosphorothioate
  modified_base 22: mod_base = OTHER; note = 2'-O-methyluridine-3'-phosphorothioate
  modified_base 23: mod_base = OTHER; note = 2'-O-methyladenosine
attcccaggtgccttttgtaata

SEQ ID NO: 1257 - RNA, 23 nt, synthetic construct
  source 1..23: mol_type = other RNA
  modified_base 1: mod_base = OTHER; note = 2'-O-methyladenosine-3'-phosphorothioate
  modified_base 2: mod_base = OTHER; note = 2'-deoxy-2'-fluorocytidine-3'-phosphorothioate
  modified_base 3: mod_base = OTHER; note = 2'-O-methylcytidine-3'-phosphate
  modified_base 4: mod_base = OTHER; note = 2'-O-methylguanosine-3'-phosphate
  modified_base 5: mod_base = OTHER; note = 2'-O-methyladenosine-3'-phosphate
  modified_base 6: mod_base = OTHER; note = 2'-deoxy-2'-fluorouridine-3'-phosphate
  modified_base 7: mod_base = OTHER; note = 2'-O-methylguanosine-3'-phosphate
  modified_base 8: mod_base = OTHER; note = 2'-deoxy-2'-fluoroadenosine-3'-phosphate
  modified_base 9: mod_base = OTHER; note = 2'-deoxy-2'-fluorocytidine-3'-phosphate
  modified_base 10: mod_base = OTHER; note = 2'-O-methyluridine-3'-phosphate
  modified_base 11: mod_base = OTHER; note = 2'-O-methyluridine-3'-phosphate
  modified_base 12: mod_base = OTHER; note = 2'-O-methylcytidine-3'-phosphate
  modified_base 13: mod_base = OTHER; note = 2'-O-methylcytidine-3'-phosphate
  modified_base 14: mod_base = OTHER; note = 2'-deoxy-2'-fluorocytidine-3'-phosphate
  modified_base 15: mod_base = OTHER; note = 2'-O-methyladenosine-3'-phosphate
  modified_base 16: mod_base = OTHER; note = 2'-deoxy-2'-fluoroguanosine-3'-phosphate
  modified_base 17: mod_base = OTHER; note = 2'-O-methylguanosine-3'-phosphate
  modified_base 18: mod_base = OTHER; note = 2'-O-methyluridine-3'-phosphate
  modified_base 19: mod_base = OTHER; note = 2'-O-methylguanosine-3'-phosphate
  modified_base 20: mod_base = OTHER; note = 2'-O-methylcytidine-3'-phosphate
  modified_base 21: mod_base = OTHER; note = 2'-O-methylcytidine-3'-phosphorothioate
  modified_base 22: mod_base = OTHER; note = 2'-O-methyluridine-3'-phosphorothioate
  modified_base 23: mod_base = OTHER; note = 2'-O-methyluridine
accgatgacttcccaggtgcctt

SEQ ID NO: 1258 - RNA, 23 nt, synthetic construct
  source 1..23: mol_type = other RNA
  modified_base 1: mod_base = OTHER; note = 2'-O-methyladenosine-3'-phosphorothioate
  modified_base 2: mod_base = OTHER; note = 2'-deoxy-2'-fluorouridine-3'-phosphorothioate
  modified_base 3: mod_base = OTHER; note = 2'-O-methylcytidine-3'-phosphate
  modified_base 4: mod_base = OTHER; note = 2'-O-methyluridine-3'-phosphate
  modified_base 5: mod_base = OTHER; note = 2'-O-methyladenosine-3'-phosphate
  modified_base 6: mod_base = OTHER; note = 2'-deoxy-2'-fluorouridine-3'-phosphate
  modified_base 7: mod_base = OTHER; note = 2'-O-methylcytidine-3'-phosphate
  modified_base 8: mod_base = OTHER; note = 2'-deoxy-2'-fluorocytidine-3'-phosphate
  modified_base 9: mod_base = OTHER; note = 2'-deoxy-2'-fluorocytidine-3'-phosphate
  modified_base 10: mod_base = OTHER; note = 2'-O-methylguanosine-3'-phosphate
  modified_base 11: mod_base = OTHER; note = 2'-O-methyladenosine-3'-phosphate
  modified_base 12: mod_base = OTHER; note = 2'-O-methyluridine-3'-phosphate
  modified_base 13: mod_base = OTHER; note = 2'-O-methylguanosine-3'-phosphate
  modified_base 14: mod_base = OTHER; note = 2'-deoxy-2'-fluoroadenosine-3'-phosphate
  modified_base 15: mod_base = OTHER; note = 2'-O-methylcytidine-3'-phosphate
  modified_base 16: mod_base = OTHER; note = 2'-deoxy-2'-fluorouridine-3'-phosphate
  modified_base 17: mod_base = OTHER; note = 2'-O-methyluridine-3'-phosphate
  modified_base 18: mod_base = OTHER; note = 2'-O-methylcytidine-3'-phosphate
  modified_base 19: mod_base = OTHER; note = 2'-O-methylcytidine-3'-phosphate
  modified_base 20: mod_base = OTHER; note = 2'-O-methylcytidine-3'-phosphate
  modified_base 21: mod_base = OTHER; note = 2'-O-methyladenosine-3'-phosphorothioate
  modified_base 22: mod_base = OTHER; note = 2'-O-methylguanosine-3'-phosphorothioate
  modified_base 23: mod_base = OTHER; note = 2'-O-methylguanosine
atctatcccgatgacttcccagg

SEQ ID NO: 1259 - RNA, 23 nt, synthetic construct
  source 1..23: mol_type = other RNA
  modified_base 1: mod_base = OTHER; note = 2'-O-methyladenosine-3'-phosphorothioate
  modified_base 2: mod_base = OTHER; note = 2'-deoxy-2'-fluoroadenosine-3'-phosphorothioate
  modified_base 3: mod_base = OTHER; note = 2'-O-methylguanosine-3'-phosphate
  modified_base 4: mod_base = OTHER; note = 2'-O-methyladenosine-3'-phosphate
  modified_base 5: mod_base = OTHER; note = 2'-O-methylguanosine-3'-phosphate
  modified_base 6: mod_base = OTHER; note = 2'-deoxy-2'-fluorocytidine-3'-phosphate
  modified_base 7: mod_base = OTHER; note = 2'-O-methyluridine-3'-phosphate
  modified_base 8: mod_base = OTHER; note = 2'-deoxy-2'-fluorouridine-3'-phosphate
  modified_base 9: mod_base = OTHER; note = 2'-deoxy-2'-fluorocytidine-3'-phosphate
  modified_base 10: mod_base = OTHER; note = 2'-O-methyluridine-3'-phosphate
  modified_base 11: mod_base = OTHER; note = 2'-O-methyladenosine-3'-phosphate
  modified_base 12: mod_base = OTHER; note = 2'-O-methyluridine-3'-phosphate
  modified_base 13: mod_base = OTHER; note = 2'-O-methylcytidine-3'-phosphate
  modified_base 14: mod_base = OTHER; note = 2'-deoxy-2'-fluorocytidine-3'-phosphate
  modified_base 15: mod_base = OTHER; note = 2'-O-methylcytidine-3'-phosphate
  modified_base 16: mod_base = OTHER; note = 2'-deoxy-2'-fluoroguanosine-3'-phosphate
  modified_base 17: mod_base = OTHER; note = 2'-O-methyladenosine-3'-phosphate
  modified_base 18: mod_base = OTHER; note = 2'-O-methyluridine-3'-phosphate
  modified_base 19: mod_base = OTHER; note = 2'-O-methylguanosine-3'-phosphate
  modified_base 20: mod_base = OTHER; note = 2'-O-methyladenosine-3'-phosphate
  modified_base 21: mod_base = OTHER; note = 2'-O-methylcytidine-3'-phosphorothioate
  modified_base 22: mod_base = OTHER; note = 2'-O-methyluridine-3'-phosphorothioate
  modified_base 23: mod_base = OTHER; note = 2'-O-methyluridine
aagagcttctatcccgatgactt

SEQ ID NO: 1260 - RNA, 23 nt, synthetic construct
  source 1..23: mol_type = other RNA
  modified_base 1: mod_base = OTHER; note = 2'-O-methyladenosine-3'-phosphorothioate
  modified_base 2: mod_base = OTHER; note = 2'-deoxy-2'-fluoroadenosine-3'-phosphorothioate
  modified_base 3: mod_base = OTHER; note = 2'-O-methylcytidine-3'-phosphate
  modified_base 4: mod_base = OTHER; note = 2'-O-methyluridine-3'-phosphate
  modified_base 5: mod_base = OTHER; note = 2'-O-methylguanosine-3'-phosphate
  modified_base 6: mod_base = OTHER; note = 2'-deoxy-2'-fluoroguanosine-3'-phosphate
  modified_base 7: mod_base = OTHER; note = 2'-O-methyluridine-3'-phosphate
  modified_base 8: mod_base = OTHER; note = 2'-deoxy-2'-fluorouridine-3'-phosphate
  modified_base 9: mod_base = OTHER; note = 2'-deoxy-2'-fluoroadenosine-3'-phosphate
  modified_base 10: mod_base = OTHER; note = 2'-O-methylguanosine-3'-phosphate
  modified_base 11: mod_base = OTHER; note = 2'-O-methyladenosine-3'-phosphate
  modified_base 12: mod_base = OTHER; note = 2'-O-methylguanosine-3'-phosphate
  modified_base 13: mod_base = OTHER; note = 2'-O-methylcytidine-3'-phosphate
  modified_base 14: mod_base = OTHER; note = 2'-deoxy-2'-fluorouridine-3'-phosphate
  modified_base 15: mod_base = OTHER; note = 2'-O-methyluridine-3'-phosphate
  modified_base 16: mod_base = OTHER; note = 2'-deoxy-2'-fluorocytidine-3'-phosphate
  modified_base 17: mod_base = OTHER; note = 2'-O-methyluridine-3'-phosphate
  modified_base 18: mod_base = OTHER; note = 2'-O-methyladenosine-3'-phosphate
  modified_base 19: mod_base = OTHER; note = 2'-O-methyluridine-3'-phosphate
  modified_base 20: mod_base = OTHER; note = 2'-O-methylcytidine-3'-phosphate
  modified_base 21: mod_base = OTHER; note = 2'-O-methylcytidine-3'-phosphorothioate
  modified_base 22: mod_base = OTHER; note = 2'-O-methylcytidine-3'-phosphorothioate
  modified_base 23: mod_base = OTHER; note = 2'-O-methylguanosine
aactggttagagcttctatcccg

SEQ ID NO: 1261 - RNA, 23 nt, synthetic construct
  source 1..23: mol_type = other RNA
  modified_base 1: mod_base = OTHER; note = 2'-O-methyladenosine-3'-phosphorothioate
  modified_base 2: mod_base = OTHER; note = 2'-deoxy-2'-fluoroadenosine-3'-phosphorothioate
  modified_base 3: mod_base = OTHER; note = 2'-O-methylguanosine-3'-phosphate
  modified_base 4: mod_base = OTHER; note = 2'-O-methyladenosine-3'-phosphate
  modified_base 5: mod_base = OTHER; note = 2'-O-methyluridine-3'-phosphate
  modified_base 6: mod_base = OTHER; note = 2'-deoxy-2'-fluoroadenosine-3'-phosphate
  modified_base 7: mod_base = OTHER; note = 2'-O-methyladenosine-3'-phosphate
  modified_base 8: mod_base = OTHER; note = 2'-deoxy-2'-fluorouridine-3'-phosphate
  modified_base 9: mod_base = OTHER; note = 2'-deoxy-2'-fluorocytidine-3'-phosphate
  modified_base 10: mod_base = OTHER; note = 2'-O-methyladenosine-3'-phosphate
  modified_base 11: mod_base = OTHER; note = 2'-O-methylcytidine-3'-phosphate
  modified_base 12: mod_base = OTHER; note = 2'-O-methyluridine-3'-phosphate
  modified_base 13: mod_base = OTHER; note = 2'-O-methylguanosine-3'-phosphate
  modified_base 14: mod_base = OTHER; note = 2'-deoxy-2'-fluoroguanosine-3'-phosphate
  modified_base 15: mod_base = OTHER; note = 2'-O-methyluridine-3'-phosphate
  modified_base 16: mod_base = OTHER; note = 2'-deoxy-2'-fluorouridine-3'-phosphate
  modified_base 17: mod_base = OTHER; note = 2'-O-methyladenosine-3'-phosphate
  modified_base 18: mod_base = OTHER; note = 2'-O-methylguanosine-3'-phosphate
  modified_base 19: mod_base = OTHER; note = 2'-O-methyladenosine-3'-phosphate
  modified_base 20: mod_base = OTHER; note = 2'-O-methylguanosine-3'-phosphate
  modified_base 21: mod_base = OTHER; note = 2'-O-methylcytidine-3'-phosphorothioate
  modified_base 22: mod_base = OTHER; note = 2'-O-methyluridine-3'-phosphorothioate
  modified_base 23: mod_base = OTHER; note = 2'-O-methyluridine
aagataatcactggttagagctt

SEQ ID NO: 1262 - RNA, 23 nt, synthetic construct
  source 1..23: mol_type = other RNA
  modified_base 1: mod_base = OTHER; note = 2'-O-methyladenosine-3'-phosphorothioate
  modified_base 2: mod_base = OTHER; note = 2'-deoxy-2'-fluorouridine-3'-phosphorothioate
  modified_base 3: mod_base = OTHER; note = 2'-O-methyladenosine-3'-phosphate
  modified_base 4: mod_base = OTHER; note = 2'-O-methylguanosine-3'-phosphate
  modified_base 5: mod_base = OTHER; note = 2'-O-methyluridine-3'-phosphate
  modified_base 6: mod_base = OTHER; note = 2'-deoxy-2'-fluoroadenosine-3'-phosphate
  modified_base 7: mod_base = OTHER; note = 2'-O-methyluridine-3'-phosphate
  modified_base 8: mod_base = OTHER; note = 2'-deoxy-2'-fluoroadenosine-3'-phosphate
  modified_base 9: mod_base = OTHER; note = 2'-deoxy-2'-fluoroguanosine-3'-phosphate
  modified_base 10: mod_base = OTHER; note = 2'-O-methyladenosine-3'-phosphate
  modified_base 11: mod_base = OTHER; note = 2'-O-methyluridine-3'-phosphate
  modified_base 12: mod_base = OTHER; note = 2'-O-methyladenosine-3'-phosphate
  modified_base 13: mod_base = OTHER; note = 2'-O-methyladenosine-3'-phosphate
  modified_base 14: mod_base = OTHER; note = 2'-deoxy-2'-fluorouridine-3'-phosphate
  modified_base 15: mod_base = OTHER; note = 2'-O-methylcytidine-3'-phosphate
  modified_base 16: mod_base = OTHER; note = 2'-deoxy-2'-fluoroadenosine-3'-phosphate
  modified_base 17: mod_base = OTHER; note = 2'-O-methylcytidine-3'-phosphate
  modified_base 18: mod_base = OTHER; note = 2'-O-methyluridine-3'-phosphate
  modified_base 19: mod_base = OTHER; note = 2'-O-methylguanosine-3'-phosphate
  modified_base 20: mod_base = OTHER; note = 2'-O-methylguanosine-3'-phosphate
  modified_base 21: mod_base = OTHER; note = 2'-O-methyluridine-3'-phosphorothioate
  modified_base 22: mod_base = OTHER; note = 2'-O-methyluridine-3'-phosphorothioate
  modified_base 23: mod_base = OTHER; note = 2'-O-methyladenosine
atagtatagataatcactggtta

SEQ ID NO: 1263 - RNA, 23 nt, synthetic construct
  source 1..23: mol_type = other RNA
  modified_base 1: mod_base = OTHER; note = 2'-O-methyladenosine-3'-phosphorothioate
  modified_base 2: mod_base = OTHER; note = 2'-deoxy-2'-fluorocytidine-3'-phosphorothioate
  modified_base 3: mod_base = OTHER; note = 2'-O-methyluridine-3'-phosphate
  modified_base 4: mod_base = OTHER; note = 2'-O-methyladenosine-3'-phosphate
  modified_base 5: mod_base = OTHER; note = 2'-O-methyladenosine-3'-phosphate
  modified_base 6: mod_base = OTHER; note = 2'-deoxy-2'-fluorouridine-3'-phosphate
  modified_base 7: mod_base = OTHER; note = 2'-O-methylguanosine-3'-phosphate
  modified_base 8: mod_base = OTHER; note = 2'-deoxy-2'-fluorouridine-3'-phosphate
  modified_base 9: mod_base = OTHER; note = 2'-deoxy-2'-fluoroadenosine-3'-phosphate
  modified_base 10: mod_base = OTHER; note = 2'-O-methylguanosine-3'-phosphate
  modified_base 11: mod_base = OTHER; note = 2'-O-methyluridine-3'-phosphate
  modified_base 12: mod_base = OTHER; note = 2'-O-methyladenosine-3'-phosphate
  modified_base 13: mod_base = OTHER; note = 2'-O-methyluridine-3'-phosphate
  modified_base 14: mod_base = OTHER; note = 2'-deoxy-2'-fluoroadenosine-3'-phosphate
  modified_base 15: mod_base = OTHER; note = 2'-O-methylguanosine-3'-phosphate
  modified_base 16: mod_base = OTHER; note = 2'-deoxy-2'-fluoroadenosine-3'-phosphate
  modified_base 17: mod_base = OTHER; note = 2'-O-methyluridine-3'-phosphate
  modified_base 18: mod_base = OTHER; note = 2'-O-methyladenosine-3'-phosphate
  modified_base 19: mod_base = OTHER; note = 2'-O-methyladenosine-3'-phosphate
  modified_base 20: mod_base = OTHER; note = 2'-O-methyluridine-3'-phosphate
  modified_base 21: mod_base = OTHER; note = 2'-O-methylcytidine-3'-phosphorothioate
  modified_base 22: mod_base = OTHER; note = 2'-O-methyladenosine-3'-phosphorothioate
  modified_base 23: mod_base = OTHER; note = 2'-O-methylcytidine
actaatgtagtatagataatcac

SEQ ID NO: 1264 - RNA, 23 nt, synthetic construct
  source 1..23: mol_type = other RNA
  modified_base 1: mod_base = OTHER; note = 2'-O-methyladenosine-3'-phosphorothioate
  modified_base 2: mod_base = OTHER; note = 2'-deoxy-2'-fluoroguanosine-3'-phosphorothioate
  modified_base 3: mod_base = OTHER; note = 2'-O-methylcytidine-3'-phosphate
  modified_base 4: mod_base = OTHER; note = 2'-O-methyladenosine-3'-phosphate
  modified_base 5: mod_base = OTHER; note = 2'-O-methyluridine-3'-phosphate
  modified_base 6: mod_base = OTHER; note = 2'-deoxy-2'-fluorouridine-3'-phosphate
  modified_base 7: mod_base = OTHER; note = 2'-O-methylcytidine-3'-phosphate
  modified_base 8: mod_base = OTHER; note = 2'-deoxy-2'-fluorocytidine-3'-phosphate
  modified_base 9: mod_base = OTHER; note = 2'-deoxy-2'-fluorouridine-3'-phosphate
  modified_base 10: mod_base = OTHER; note = 2'-O-methyluridine-3'-phosphate
  modified_base 11: mod_base = OTHER; note = 2'-O-methyluridine-3'-phosphate
  modified_base 12: mod_base = OTHER; note = 2'-O-methyladenosine-3'-phosphate
  modified_base 13: mod_base = OTHER; note = 2'-O-methyluridine-3'-phosphate
  modified_base 14: mod_base = OTHER; note = 2'-deoxy-2'-fluoroadenosine-3'-phosphate
  modified_base 15: mod_base = OTHER; note = 2'-O-methyluridine-3'-phosphate
  modified_base 16: mod_base = OTHER; note = 2'-deoxy-2'-fluorouridine-3'-phosphate
  modified_base 17: mod_base = OTHER; note = 2'-O-methylcytidine-3'-phosphate
  modified_base 18: mod_base = OTHER; note = 2'-O-methyladenosine-3'-phosphate
  modified_base 19: mod_base = OTHER; note = 2'-O-methyluridine-3'-phosphate
  modified_base 20: mod_base = OTHER; note = 2'-O-methyluridine-3'-phosphate
  modified_base 21: mod_base = OTHER; note = 2'-O-methyladenosine-3'-phosphorothioate
  modified_base 22: mod_base = OTHER; note = 2'-O-methylcytidine-3'-phosphorothioate
  modified_base 23: mod_base = OTHER; note = 2'-O-methyluridine
agcattcctttatattcattact

SEQ ID NO: 1265 - RNA, 23 nt, synthetic construct
  source 1..23: mol_type = other RNA
  modified_base 1: mod_base = OTHER; note = 2'-O-methyladenosine-3'-phosphorothioate
  modified_base 2: mod_base = OTHER; note = 2'-deoxy-2'-fluorocytidine-3'-phosphorothioate
  modified_base 3: mod_base = OTHER; note = 2'-O-methyluridine-3'-phosphate
  modified_base 4: mod_base = OTHER; note = 2'-O-methylcytidine-3'-phosphate
  modified_base 5: mod_base = OTHER; note = 2'-O-methylcytidine-3'-phosphate
  modified_base 6: mod_base = OTHER; note = 2'-deoxy-2'-fluorouridine-3'-phosphate
  modified_base 7: mod_base = OTHER; note = 2'-O-methylguanosine-3'-phosphate
  modified_base 8: mod_base = OTHER; note = 2'-deoxy-2'-fluoroguanosine-3'-phosphate
  modified_base 9: mod_base = OTHER; note = 2'-deoxy-2'-fluorocytidine-3'-phosphate
  modified_base 10: mod_base = OTHER; note = 2'-O-methyladenosine-3'-phosphate
  modified_base 11: mod_base = OTHER; note = 2'-O-methyluridine-3'-phosphate
  modified_base 12: mod_base = OTHER; note = 2'-O-methyluridine-3'-phosphate
  modified_base 13: mod_base = OTHER; note = 2'-O-methylcytidine-3'-phosphate
  modified_base 14: mod_base = OTHER; note = 2'-deoxy-2'-fluorocytidine-3'-phosphate
  modified_base 15: mod_base = OTHER; note = 2'-O-methyluridine-3'-phosphate
  modified_base 16: mod_base = OTHER; note = 2'-deoxy-2'-fluorouridine-3'-phosphate
  modified_base 17: mod_base = OTHER; note = 2'-O-methyluridine-3'-phosphate
  modified_base 18: mod_base = OTHER; note = 2'-O-methyladenosine-3'-phosphate
  modified_base 19: mod_base = OTHER; note = 2'-O-methyluridine-3'-phosphate
  modified_base 20: mod_base = OTHER; note = 2'-O-methyladenosine-3'-phosphate
  modified_base 21: mod_base = OTHER; note = 2'-O-methyluridine-3'-phosphorothioate
  modified_base 22: mod_base = OTHER; note = 2'-O-methyluridine-3'-phosphorothioate
  modified_base 23: mod_base = OTHER; note = 2'-O-methylcytidine
actcctggcattcctttatattc

SEQ ID NO: 1266 - RNA, 23 nt, synthetic construct
  source 1..23: mol_type = other RNA
  modified_base 1: mod_base = OTHER; note = 2'-O-methyladenosine-3'-phosphorothioate
  modified_base 2: mod_base = OTHER; note = 2'-deoxy-2'-fluoroadenosine-3'-phosphorothioate
  modified_base 3: mod_base = OTHER; note = 2'-O-methyluridine-3'-phosphate
  modified_base 4: mod_base = OTHER; note = 2'-O-methyladenosine-3'-phosphate
  modified_base 5: mod_base = OTHER; note = 2'-O-methyladenosine-3'-phosphate
  modified_base 6: mod_base = OTHER; note = 2'-deoxy-2'-fluoroadenosine-3'-phosphate
  modified_base 7: mod_base = OTHER; note = 2'-O-methylguanosine-3'-phosphate
  modified_base 8: mod_base = OTHER; note = 2'-deoxy-2'-fluoroadenosine-3'-phosphate
  modified_base 9: mod_base = OTHER; note = 2'-deoxy-2'-fluorouridine-3'-phosphate
  modified_base 10: mod_base = OTHER; note = 2'-O-methyluridine-3'-phosphate
  modified_base 11: mod_base = OTHER; note = 2'-O-methylcytidine-3'-phosphate
  modified_base 12: mod_base = OTHER; note = 2'-O-methylcytidine-3'-phosphate
  modified_base 13: mod_base = OTHER; note = 2'-O-methyluridine-3'-phosphate
  modified_base 14: mod_base = OTHER; note = 2'-deoxy-2'-fluorouridine-3'-phosphate
  modified_base 15: mod_base = OTHER; note = 2'-O-methylcytidine-3'-phosphate
  modified_base 16: mod_base = OTHER; note = 2'-deoxy-2'-fluorocytidine-3'-phosphate
  modified_base 17: mod_base = OTHER; note = 2'-O-methyluridine-3'-phosphate
  modified_base 18: mod_base = OTHER; note = 2'-O-methylcytidine-3'-phosphate
  modified_base 19: mod_base = OTHER; note = 2'-O-methylcytidine-3'-phosphate
  modified_base 20: mod_base = OTHER; note = 2'-O-methyluridine-3'-phosphate
  modified_base 21: mod_base = OTHER; note = 2'-O-methylguanosine-3'-phosphorothioate
  modified_base 22: mod_base = OTHER; note = 2'-O-methylguanosine-3'-phosphorothioate
  modified_base 23: mod_base = OTHER; note = 2'-O-methylcytidine
aataaagattccttcctcctggc

SEQ ID NO: 1267 - RNA, 23 nt, synthetic construct
  source 1..23: mol_type = other RNA
  modified_base 1: mod_base = OTHER; note = 2'-O-methyladenosine-3'-phosphorothioate
  modified_base 2: mod_base = OTHER; note = 2'-deoxy-2'-fluoroguanosine-3'-phosphorothioate
  modified_base 3: mod_base = OTHER; note = 2'-O-methyladenosine-3'-phosphate
  modified_base 4: mod_base = OTHER; note = 2'-O-methyluridine-3'-phosphate
  modified_base 5: mod_base = OTHER; note = 2'-O-methyluridine-3'-phosphate
  modified_base 6: mod_base = OTHER; note = 2'-deoxy-2'-fluorouridine-3'-phosphate
  modified_base 7: mod_base = OTHER; note = 2'-O-methyluridine-3'-phosphate
  modified_base 8: mod_base = OTHER; note = 2'-deoxy-2'-fluoroadenosine-3'-phosphate
  modified_base 9: mod_base = OTHER; note = 2'-deoxy-2'-fluorouridine-3'-phosphate
  modified_base 10: mod_base = OTHER; note = 2'-O-methyladenosine-3'-phosphate
  modified_base 11: mod_base = OTHER; note = 2'-O-methyladenosine-3'-phosphate
  modified_base 12: mod_base = OTHER; note = 2'-O-methyladenosine-3'-phosphate
  modified_base 13: mod_base = OTHER; note = 2'-O-methylguanosine-3'-phosphate
  modified_base 14: mod_base = OTHER; note = 2'-deoxy-2'-fluoroadenosine-3'-phosphate
  modified_base 15: mod_base = OTHER; note = 2'-O-methyluridine-3'-phosphate
  modified_base 16: mod_base = OTHER; note = 2'-deoxy-2'-fluorouridine-3'-phosphate
  modified_base 17: mod_base = OTHER; note = 2'-O-methylcytidine-3'-phosphate
  modified_base 18: mod_base = OTHER; note = 2'-O-methylcytidine-3'-phosphate
  modified_base 19: mod_base = OTHER; note = 2'-O-methyluridine-3'-phosphate
  modified_base 20: mod_base = OTHER; note = 2'-O-methyluridine-3'-phosphate
  modified_base 21: mod_base = OTHER; note = 2'-O-methylcytidine-3'-phosphorothioate
  modified_base 22: mod_base = OTHER; note = 2'-O-methylcytidine-3'-phosphorothioate
  modified_base 23: mod_base = OTHER; note = 2'-O-methyluridine
agattttataaagattccttcct

SEQ ID NO: 1268 - RNA, 23 nt, synthetic construct
  source 1..23: mol_type = other RNA
  modified_base 1: mod_base = OTHER; note = 2'-O-methyladenosine-3'-phosphorothioate
  modified_base 2: mod_base = OTHER; note = 2'-deoxy-2'-fluorocytidine-3'-phosphorothioate
  modified_base 3: mod_base = OTHER; note = 2'-O-methyladenosine-3'-phosphate
  modified_base 4: mod_base = OTHER; note = 2'-O-methylcytidine-3'-phosphate
  modified_base 5: mod_base = OTHER; note = 2'-O-methyluridine-3'-phosphate
  modified_base 6: mod_base = OTHER; note = 2'-deoxy-2'-fluoroadenosine-3'-phosphate
  modified_base 7: mod_base = OTHER; note = 2'-O-methyladenosine-3'-phosphate
  modified_base 8: mod_base = OTHER; note = 2'-deoxy-2'-fluoroguanosine-3'-phosphate
  modified_base 9: mod_base = OTHER; note = 2'-deoxy-2'-fluorouridine-3'-phosphate
  modified_base 10: mod_base = OTHER; note = 2'-O-methyluridine-3'-phosphate
  modified_base 11: mod_base = OTHER; note = 2'-O-methylguanosine-3'-phosphate
  modified_base 12: mod_base = OTHER; note = 2'-O-methylguanosine-3'-phosphate
  modified_base 13: mod_base = OTHER; note = 2'-O-methyladenosine-3'-phosphate
  modified_base 14: mod_base = OTHER; note = 2'-deoxy-2'-fluorouridine-3'-phosphate
  modified_base 15: mod_base = OTHER; note = 2'-O-methyluridine-3'-phosphate
  modified_base 16: mod_base = OTHER; note = 2'-deoxy-2'-fluorouridine-3'-phosphate
  modified_base 17: mod_base = OTHER; note = 2'-O-methyluridine-3'-phosphate
  modified_base 18: mod_base = OTHER; note = 2'-O-methyladenosine-3'-phosphate
  modified_base 19: mod_base = OTHER; note = 2'-O-methyluridine-3'-phosphate
  modified_base 20: mod_base = OTHER; note = 2'-O-methyladenosine-3'-phosphate
  modified_base 21: mod_base = OTHER; note = 2'-O-methyladenosine-3'-phosphorothioate
  modified_base 22: mod_base = OTHER; note = 2'-O-methyladenosine-3'-phosphorothioate
  modified_base 23: mod_base = OTHER; note = 2'-O-methylguanosine
acactaagttggattttataaag

SEQ ID NO: 1269 - RNA, 23 nt, synthetic construct
  source 1..23: mol_type = other RNA
  modified_base 1: mod_base = OTHER; note = 2'-O-methyladenosine-3'-phosphorothioate
  modified_base 2: mod_base = OTHER; note = 2'-deoxy-2'-fluorouridine-3'-phosphorothioate
  modified_base 3: mod_base = OTHER; note = 2'-O-methyluridine-3'-phosphate
  modified_base 4: mod_base = OTHER; note = 2'-O-methyluridine-3'-phosphate
  modified_base 5: mod_base = OTHER; note = 2'-O-methylguanosine-3'-phosphate
  modified_base 6: mod_base = OTHER; note = 2'-deoxy-2'-fluorouridine-3'-phosphate
  modified_base 7: mod_base = OTHER; note = 2'-O-methyladenosine-3'-phosphate
  modified_base 8: mod_base = OTHER; note = 2'-deoxy-2'-fluorouridine-3'-phosphate
  modified_base 9: mod_base = OTHER; note = 2'-deoxy-2'-fluoroadenosine-3'-phosphate
  modified_base 10: mod_base = OTHER; note = 2'-O-methylguanosine-3'-phosphate
  modified_base 11: mod_base = OTHER; note = 2'-O-methyluridine-3'-phosphate
  modified_base 12: mod_base = OTHER; note = 2'-O-methylcytidine-3'-phosphate
  modified_base 13: mod_base = OTHER; note = 2'-O-methyladenosine-3'-phosphate
  modified_base 14: mod_base = OTHER; note = 2'-deoxy-2'-fluorocytidine-3'-phosphate
  modified_base 15: mod_base = OTHER; note = 2'-O-methyluridine-3'-phosphate
  modified_base 16: mod_base = OTHER; note = 2'-deoxy-2'-fluoroadenosine-3'-phosphate
  modified_base 17: mod_base = OTHER; note = 2'-O-methyladenosine-3'-phosphate
  modified_base 18: mod_base = OTHER; note = 2'-O-methylguanosine-3'-phosphate
  modified_base 19: mod_base = OTHER; note = 2'-O-methyluridine-3'-phosphate
  modified_base 20: mod_base = OTHER; note = 2'-O-methyluridine-3'-phosphate
  modified_base 21: mod_base = OTHER; note = 2'-O-methylguanosine-3'-phosphorothioate
  modified_base 22: mod_base = OTHER; note = 2'-O-methylguanosine-3'-phosphorothioate
  modified_base 23: mod_base = OTHER; note = 2'-O-methyladenosine
atttgtatagtcactaagttgga

SEQ ID NO: 1270 - RNA, 23 nt, synthetic construct
  source 1..23: mol_type = other RNA
  modified_base 1: mod_base = OTHER; note = 2'-O-methyladenosine-3'-phosphorothioate
  modified_base 2: mod_base = OTHER; note = 2'-deoxy-2'-fluoroadenosine-3'-phosphorothioate
  modified_base 3: mod_base = OTHER; note = 2'-O-methyluridine-3'-phosphate
  modified_base 4: mod_base = OTHER; note = 2'-O-methylguanosine-3'-phosphate
  modified_base 5: mod_base = OTHER; note = 2'-O-methyluridine-3'-phosphate
  modified_base 6: mod_base = OTHER; note = 2'-deoxy-2'-fluorocytidine-3'-phosphate
  modified_base 7: mod_base = OTHER; note = 2'-O-methyladenosine-3'-phosphate
  modified_base 8: mod_base = OTHER; note = 2'-deoxy-2'-fluorocytidine-3'-phosphate
  modified_base 9: mod_base = OTHER; note = 2'-deoxy-2'-fluorouridine-3'-phosphate
  modified_base 10: mod_base = OTHER; note = 2'-O-methyluridine-3'-phosphate
  modified_base 11: mod_base = OTHER; note = 2'-O-methyluridine-3'-phosphate
  modified_base 12: mod_base = OTHER; note = 2'-O-methyluridine-3'-phosphate
  modified_base 13: mod_base = OTHER; note = 2'-O-methylguanosine-3'-phosphate
  modified_base 14: mod_base = OTHER; note = 2'-deoxy-2'-fluorouridine-3'-phosphate
  modified_base 15: mod_base = OTHER; note = 2'-O-methyladenosine-3'-phosphate
  modified_base 16: mod_base = OTHER; note = 2'-deoxy-2'-fluorouridine-3'-phosphate
  modified_base 17: mod_base = OTHER; note = 2'-O-methyladenosine-3'-phosphate
  modified_base 18: mod_base = OTHER; note = 2'-O-methylguanosine-3'-phosphate
  modified_base 19: mod_base = OTHER; note = 2'-O-methyluridine-3'-phosphate
  modified_base 20: mod_base = OTHER; note = 2'-O-methylcytidine-3'-phosphate
  modified_base 21: mod_base = OTHER; note = 2'-O-methyladenosine-3'-phosphorothioate
  modified_base 22: mod_base = OTHER; note = 2'-O-methylcytidine-3'-phosphorothioate
  modified_base 23: mod_base = OTHER; note = 2'-O-methyluridine
aatgtcacttttgtatagtcact

SEQ ID NO: 1271 - RNA, 23 nt, synthetic construct
  source 1..23: mol_type = other RNA
  modified_base 1: mod_base = OTHER; note = 2'-O-methyladenosine-3'-phosphorothioate
  modified_base 2: mod_base = OTHER; note = 2'-deoxy-2'-fluoroadenosine-3'-phosphorothioate
  modified_base 3: mod_base = OTHER; note = 2'-O-methyladenosine-3'-phosphate
  modified_base 4: mod_base = OTHER; note = 2'-O-methylcytidine-3'-phosphate
  modified_base 5: mod_base = OTHER; note = 2'-O-methyluridine-3'-phosphate
  modified_base 6: mod_base = OTHER; note = 2'-deoxy-2'-fluoroguanosine-3'-phosphate
  modified_base 7: mod_base = OTHER; note = 2'-O-methyladenosine-3'-phosphate
  modified_base 8: mod_base = OTHER; note = 2'-deoxy-2'-fluoroguanosine-3'-phosphate
  modified_base 9: mod_base = OTHER; note = 2'-deoxy-2'-fluoroguanosine-3'-phosphate
  modified_base 10: mod_base = OTHER; note = 2'-O-methylcytidine-3'-phosphate
  modified_base 11: mod_base = OTHER; note = 2'-O-methyladenosine-3'-phosphate
  modified_base 12: mod_base = OTHER; note = 2'-O-methyluridine-3'-phosphate
  modified_base 13: mod_base = OTHER; note = 2'-O-methylguanosine-3'-phosphate
  modified_base 14: mod_base = OTHER; note = 2'-deoxy-2'-fluorouridine-3'-phosphate
  modified_base 15: mod_base = OTHER; note = 2'-O-methylcytidine-3'-phosphate
  modified_base 16: mod_base = OTHER; note = 2'-deoxy-2'-fluoroadenosine-3'-phosphate
  modified_base 17: mod_base = OTHER; note = 2'-O-methylcytidine-3'-phosphate
  modified_base 18: mod_base = OTHER; note = 2'-O-methyluridine-3'-phosphate
  modified_base 19: mod_base = OTHER; note = 2'-O-methyluridine-3'-phosphate
  modified_base 20: mod_base = OTHER; note = 2'-O-methyluridine-3'-phosphate
  modified_base 21: mod_base = OTHER; note = 2'-O-methyluridine-3'-phosphorothioate
  modified_base 22: mod_base = OTHER; note = 2'-O-methylguanosine-3'-phosphorothioate
  modified_base 23: mod_base = OTHER; note = 2'-O-methyluridine
aaactgaggcatgtcacttttgt

SEQ ID NO: 1272 - RNA, 23 nt, synthetic construct
  source 1..23: mol_type = other RNA
  modified_base 1: mod_base = OTHER; note = 2'-O-methyladenosine-3'-phosphorothioate
  modified_base 2: mod_base = OTHER; note = 2'-deoxy-2'-fluoroguanosine-3'-phosphorothioate
  modified_base 3: mod_base = OTHER; note = 2'-O-methyladenosine-3'-phosphate
  modified_base 4: mod_base = OTHER; note = 2'-O-methyluridine-3'-phosphate
  modified_base 5: mod_base = OTHER; note = 2'-O-methyluridine-3'-phosphate
  modified_base 6: mod_base = OTHER; note = 2'-deoxy-2'-fluorocytidine-3'-phosphate
  modified_base 7: mod_base = OTHER; note = 2'-O-methyladenosine-3'-phosphate
  modified_base 8: mod_base = OTHER; note = 2'-deoxy-2'-fluoroguanosine-3'-phosphate
  modified_base 9: mod_base = OTHER; note = 2'-deoxy-2'-fluorocytidine-3'-phosphate
  modified_base 10: mod_base = OTHER; note = 2'-O-methyluridine-3'-phosphate
  modified_base 11: mod_base = OTHER; note = 2'-O-methylcytidine-3'-phosphate
  modified_base 12: mod_base = OTHER; note = 2'-O-methyladenosine-3'-phosphate
  modified_base 13: mod_base = OTHER; note = 2'-O-methylcytidine-3'-phosphate
  modified_base 14: mod_base = OTHER; note = 2'-deoxy-2'-fluoroadenosine-3'-phosphate
  modified_base 15: mod_base = OTHER; note = 2'-O-methyladenosine-3'-phosphate
  modified_base 16: mod_base = OTHER; note = 2'-deoxy-2'-fluorocytidine-3'-phosphate
  modified_base 17: mod_base = OTHER; note = 2'-O-methyluridine-3'-phosphate
  modified_base 18: mod_base = OTHER; note = 2'-O-methylguanosine-3'-phosphate
  modified_base 19: mod_base = OTHER; note = 2'-O-methyladenosine-3'-phosphate
  modified_base 20: mod_base = OTHER; note = 2'-O-methylguanosine-3'-phosphate
  modified_base 21: mod_base = OTHER; note = 2'-O-methylguanosine-3'-phosphorothioate
  modified_base 22: mod_base = OTHER; note = 2'-O-methylcytidine-3'-phosphorothioate
  modified_base 23: mod_base = OTHER; note = 2'-O-methyladenosine
agattcagctcacaactgaggca

SEQ ID NO: 1273 - RNA, 23 nt, synthetic construct
  source 1..23: mol_type = other RNA
  modified_base 1: mod_base = OTHER; note = 2'-O-methyladenosine-3'-phosphorothioate
  modified_base 2: mod_base = OTHER; note = 2'-deoxy-2'-fluorocytidine-3'-phosphorothioate
  modified_base 3: mod_base = OTHER; note = 2'-O-methyladenosine-3'-phosphate
  modified_base 4: mod_base = OTHER; note = 2'-O-methylcytidine-3'-phosphate
  modified_base 5: mod_base = OTHER; note = 2'-O-methylcytidine-3'-phosphate
  modified_base 6: mod_base = OTHER; note = 2'-deoxy-2'-fluorouridine-3'-phosphate
  modified_base 7: mod_base = OTHER; note = 2'-O-methyluridine-3'-phosphate
  modified_base 8: mod_base = OTHER; note = 2'-deoxy-2'-fluorouridine-3'-phosphate
  modified_base 9: mod_base = OTHER; note = 2'-deoxy-2'-fluorocytidine-3'-phosphate
  modified_base 10: mod_base = OTHER; note = 2'-O-methylcytidine-3'-phosphate
  modified_base 11: mod_base = OTHER; note = 2'-O-methylguanosine-3'-phosphate
  modified_base 12: mod_base = OTHER; note = 2'-O-methylguanosine-3'-phosphate
  modified_base 13: mod_base = OTHER; note = 2'-O-methyladenosine-3'-phosphate
  modified_base 14: mod_base = OTHER; note = 2'-deoxy-2'-fluorouridine-3'-phosphate
  modified_base 15: mod_base = OTHER; note = 2'-O-methyluridine-3'-phosphate
  modified_base 16: mod_base = OTHER; note = 2'-deoxy-2'-fluorocytidine-3'-phosphate
  modified_base 17: mod_base = OTHER; note = 2'-O-methyladenosine-3'-phosphate
  modified_base 18: mod_base = OTHER; note = 2'-O-methylguanosine-3'-phosphate
  modified_base 19: mod_base = OTHER; note = 2'-O-methylcytidine-3'-phosphate
  modified_base 20: mod_base = OTHER; note = 2'-O-methyluridine-3'-phosphate
  modified_base 21: mod_base = OTHER; note = 2'-O-methylcytidine-3'-phosphorothioate
  modified_base 22: mod_base = OTHER; note = 2'-O-methyladenosine-3'-phosphorothioate
  modified_base 23: mod_base = OTHER; note = 2'-O-methylcytidine
acacctttccggattcagctcac

SEQ ID NO: 1274 - RNA, 23 nt, synthetic construct
  source 1..23: mol_type = other RNA
  modified_base 1: mod_base = OTHER; note = 2'-O-methyladenosine-3'-phosphorothioate
  modified_base 2: mod_base = OTHER; note = 2'-deoxy-2'-fluorouridine-3'-phosphorothioate
  modified_base 3: mod_base = OTHER; note = 2'-O-methyladenosine-3'-phosphate
  modified_base 4: mod_base = OTHER; note = 2'-O-methylguanosine-3'-phosphate
  modified_base 5: mod_base = OTHER; note = 2'-O-methyluridine-3'-phosphate
  modified_base 6: mod_base = OTHER; note = 2'-deoxy-2'-fluoroadenosine-3'-phosphate
  modified_base 7: mod_base = OTHER; note = 2'-O-methylcytidine-3'-phosphate
  modified_base 8: mod_base = OTHER; note = 2'-deoxy-2'-fluorouridine-3'-phosphate
  modified_base 9: mod_base = OTHER; note = 2'-deoxy-2'-fluoroguanosine-3'-phosphate
  modified_base 10: mod_base = OTHER; note = 2'-O-methyladenosine-3'-phosphate
  modified_base 11: mod_base = OTHER; note = 2'-O-methylcytidine-3'-phosphate
  modified_base 12: mod_base = OTHER; note = 2'-O-methyladenosine-3'-phosphate
  modified_base 13: mod_base = OTHER; note = 2'-O-methylcytidine-3'-phosphate
  modified_base 14: mod_base = OTHER; note = 2'-deoxy-2'-fluorocytidine-3'-phosphate
  modified_base 15: mod_base = OTHER; note = 2'-O-methyluridine-3'-phosphate
  modified_base 16: mod_base = OTHER; note = 2'-deoxy-2'-fluorouridine-3'-phosphate
  modified_base 17: mod_base = OTHER; note = 2'-O-methyluridine-3'-phosphate
  modified_base 18: mod_base = OTHER; note = 2'-O-methylcytidine-3'-phosphate
  modified_base 19: mod_base = OTHER; note = 2'-O-methylcytidine-3'-phosphate
  modified_base 20: mod_base = OTHER; note = 2'-O-methylguanosine-3'-phosphate
  modified_base 21: mod_base = OTHER; note = 2'-O-methylguanosine-3'-phosphorothioate
  modified_base 22: mod_base = OTHER; note = 2'-O-methyladenosine-3'-phosphorothioate
  modified_base 23: mod_base = OTHER; note = 2'-O-methyluridine
atagtactgacacctttccggat

SEQ ID NO: 1275 - RNA, 23 nt, synthetic construct
  source 1..23: mol_type = other RNA
  modified_base 1: mod_base = OTHER; note = 2'-O-methyladenosine-3'-phosphorothioate
  modified_base 2: mod_base = OTHER; note = 2'-deoxy-2'-fluoroadenosine-3'-phosphorothioate
  modified_base 3: mod_base = OTHER; note = 2'-O-methylcytidine-3'-phosphate
  modified_base 4: mod_base = OTHER; note = 2'-O-methyladenosine-3'-phosphate
  modified_base 5: mod_base = OTHER; note = 2'-O-methylguanosine-3'-phosphate
  modified_base 6: mod_base = OTHER; note = 2'-deoxy-2'-fluoroadenosine-3'-phosphate
  modified_base 7: mod_base = OTHER; note = 2'-O-methyladenosine-3'-phosphate
  modified_base 8: mod_base = OTHER; note = 2'-deoxy-2'-fluorouridine-3'-phosphate
  modified_base 9: mod_base = OTHER; note = 2'-deoxy-2'-fluoroadenosine-3'-phosphate
  modified_base 10: mod_base = OTHER; note = 2'-O-methylguanosine-3'-phosphate
  modified_base 11: mod_base = OTHER; note = 2'-O-methyluridine-3'-phosphate
  modified_base 12: mod_base = OTHER; note = 2'-O-methyladenosine-3'-phosphate
  modified_base 13: mod_base = OTHER; note = 2'-O-methylcytidine-3'-phosphate
  modified_base 14: mod_base = OTHER; note = 2'-deoxy-2'-fluorouridine-3'-phosphate
  modified_base 15: mod_base = OTHER; note = 2'-O-methylguanosine-3'-phosphate
  modified_base 16: mod_base = OTHER; note = 2'-deoxy-2'-fluoroadenosine-3'-phosphate
  modified_base 17: mod_base = OTHER; note = 2'-O-methylcytidine-3'-phosphate
  modified_base 18: mod_base = OTHER; note = 2'-O-methyladenosine-3'-phosphate
  modified_base 19: mod_base = OTHER; note = 2'-O-methylcytidine-3'-phosphate
  modified_base 20: mod_base = OTHER; note = 2'-O-methylcytidine-3'-phosphate
  modified_base 21: mod_base = OTHER; note = 2'-O-methyluridine-3'-phosphorothioate
  modified_base 22: mod_base = OTHER; note = 2'-O-methyluridine-3'-phosphorothioate
  modified_base 23: mod_base = OTHER; note = 2'-O-methyluridine
aacagaatagtactgacaccttt

SEQ ID NO: 1276 - RNA, 23 nt, synthetic construct
  source 1..23: mol_type = other RNA
  modified_base 1: mod_base = OTHER; note = 2'-O-methyladenosine-3'-phosphorothioate
  modified_base 2: mod_base = OTHER; note = 2'-deoxy-2'-fluoroadenosine-3'-phosphorothioate
  modified_base 3: mod_base = OTHER; note = 2'-O-methyladenosine-3'-phosphate
  modified_base 4: mod_base = OTHER; note = 2'-O-methyluridine-3'-phosphate
  modified_base 5: mod_base = OTHER; note = 2'-O-methylguanosine-3'-phosphate
  modified_base 6: mod_base = OTHER; note = 2'-deoxy-2'-fluoroadenosine-3'-phosphate
  modified_base 7: mod_base = OTHER; note = 2'-O-methylcytidine-3'-phosphate
  modified_base 8: mod_base = OTHER; note = 2'-deoxy-2'-fluoroadenosine-3'-phosphate
  modified_base 9: mod_base = OTHER; note = 2'-deoxy-2'-fluorocytidine-3'-phosphate
  modified_base 10: mod_base = OTHER; note = 2'-O-methyladenosine-3'-phosphate
  modified_base 11: mod_base = OTHER; note = 2'-O-methylguanosine-3'-phosphate
  modified_base 12: mod_base = OTHER; note = 2'-O-methyladenosine-3'-phosphate
  modified_base 13: mod_base = OTHER; note = 2'-O-methyladenosine-3'-phosphate
  modified_base 14: mod_base = OTHER; note = 2'-deoxy-2'-fluorouridine-3'-phosphate
  modified_base 15: mod_base = OTHER; note = 2'-O-methyladenosine-3'-phosphate
  modified_base 16: mod_base = OTHER; note = 2'-deoxy-2'-fluoroguanosine-3'-phosphate
  modified_base 17: mod_base = OTHER; note = 2'-O-methyluridine-3'-phosphate
  modified_base 18: mod_base = OTHER; note = 2'-O-methyladenosine-3'-phosphate
  modified_base 19: mod_base = OTHER; note = 2'-O-methylcytidine-3'-phosphate
  modified_base 20: mod_base = OTHER; note = 2'-O-methyluridine-3'-phosphate
  modified_base 21: mod_base = OTHER; note = 2'-O-methylguanosine-3'-phosphorothioate
  modified_base 22: mod_base = OTHER; note = 2'-O-methyladenosine-3'-phosphorothioate
  modified_base 23: mod_base = OTHER; note = 2'-O-methylcytidine
aaatgacacagaatagtactgac

SEQ ID NO: 1277 - RNA, 23 nt, synthetic construct
  source 1..23: mol_type = other RNA
  modified_base 1: mod_base = OTHER; note = 2'-O-methyladenosine-3'-phosphorothioate
  modified_base 2: mod_base = OTHER; note = 2'-deoxy-2'-fluorocytidine-3'-phosphorothioate
  modified_base 3: mod_base = OTHER; note = 2'-O-methyluridine-3'-phosphate
  modified_base 4: mod_base = OTHER; note = 2'-O-methylcytidine-3'-phosphate
  modified_base 5: mod_base = OTHER; note = 2'-O-methyluridine-3'-phosphate
  modified_base 6: mod_base = OTHER; note = 2'-deoxy-2'-fluorouridine-3'-phosphate
  modified_base 7: mod_base = OTHER; note = 2'-O-methyluridine-3'-phosphate
  modified_base 8: mod_base = OTHER; note = 2'-deoxy-2'-fluoroadenosine-3'-phosphate
  modified_base 9: mod_base = OTHER; note = 2'-deoxy-2'-fluorocytidine-3'-phosphate
  modified_base 10: mod_base = OTHER; note = 2'-O-methyluridine-3'-phosphate
  modified_base 11: mod_base = OTHER; note = 2'-O-methylguanosine-3'-phosphate
  modified_base 12: mod_base = OTHER; note = 2'-O-methyladenosine-3'-phosphate
  modified_base 13: mod_base = OTHER; note = 2'-O-methyladenosine-3'-phosphate
  modified_base 14: mod_base = OTHER; note = 2'-deoxy-2'-fluorouridine-3'-phosphate
  modified_base 15: mod_base = OTHER; note = 2'-O-methylguanosine-3'-phosphate
  modified_base 16: mod_base = OTHER; note = 2'-deoxy-2'-fluoroadenosine-3'-phosphate
  modified_base 17: mod_base = OTHER; note = 2'-O-methylcytidine-3'-phosphate
  modified_base 18: mod_base = OTHER; note = 2'-O-methyladenosine-3'-phosphate
  modified_base 19: mod_base = OTHER; note = 2'-O-methylcytidine-3'-phosphate
  modified_base 20: mod_base = OTHER; note = 2'-O-methyladenosine-3'-phosphate
  modified_base 21: mod_base = OTHER; note = 2'-O-methylguanosine-3'-phosphorothioate
  modified_base 22: mod_base = OTHER; note = 2'-O-methyladenosine-3'-phosphorothioate
  modified_base 23: mod_base = OTHER; note = 2'-O-methyladenosine
actctttactgaatgacacagaa

SEQ ID NO: 1278 - RNA, 23 nt, synthetic construct
  source 1..23: mol_type = other RNA
  modified_base 1: mod_base = OTHER; note = 2'-O-methyladenosine-3'-phosphorothioate
  modified_base 2: mod_base = OTHER; note = 2'-deoxy-2'-fluoroadenosine-3'-phosphorothioate
  modified_base 3: mod_base = OTHER; note = 2'-O-methyluridine-3'-phosphate
  modified_base 4: mod_base = OTHER; note = 2'-O-methyladenosine-3'-phosphate
  modified_base 5: mod_base = OTHER; note = 2'-O-methylcytidine-3'-phosphate
  modified_base 6: mod_base = OTHER; note = 2'-deoxy-2'-fluorouridine-3'-phosphate
  modified_base 7: mod_base = OTHER; note = 2'-O-methyluridine-3'-phosphate
  modified_base 8: mod_base = OTHER; note = 2'-deoxy-2'-fluorocytidine-3'-phosphate
  modified_base 9: mod_base = OTHER; note = 2'-deoxy-2'-fluoroguanosine-3'-phosphate
  modified_base 10: mod_base = OTHER; note = 2'-O-methylcytidine-3'-phosphate
  modified_base 11: mod_base = OTHER; note = 2'-O-methylcytidine-3'-phosphate
  modified_base 12: mod_base = OTHER; note = 2'-O-methyluridine-3'-phosphate
  modified_base 13: mod_base = OTHER; note = 2'-O-methylcytidine-3'-phosphate
  modified_base 14: mod_base = OTHER; note = 2'-deoxy-2'-fluorouridine-3'-phosphate
  modified_base 15: mod_base = OTHER; note = 2'-O-methyluridine-3'-phosphate
  modified_base 16: mod_base = OTHER; note = 2'-deoxy-2'-fluorouridine-3'-phosphate
  modified_base 17: mod_base = OTHER; note = 2'-O-methyladenosine-3'-phosphate
  modified_base 18: mod_base = OTHER; note = 2'-O-methylcytidine-3'-phosphate
  modified_base 19: mod_base = OTHER; note = 2'-O-methyluridine-3'-phosphate
  modified_base 20: mod_base = OTHER; note = 2'-O-methylguanosine-3'-phosphate
  modified_base 21: mod_base = OTHER; note = 2'-O-methyladenosine-3'-phosphorothioate
  modified_base 22: mod_base = OTHER; note = 2'-O-methyladenosine-3'-phosphorothioate
  modified_base 23: mod_base = OTHER; note = 2'-O-methyluridine
aatacttcgcctctttactgaat

SEQ ID NO: 1279 - RNA, 23 nt, synthetic construct
  source 1..23: mol_type = other RNA
  modified_base 1: mod_base = OTHER; note = 2'-O-methyladenosine-3'-phosphorothioate
  modified_base 2: mod_base = OTHER; note = 2'-deoxy-2'-fluoroadenosine-3'-phosphorothioate
  modified_base 3: mod_base = OTHER; note = 2'-O-methylguanosine-3'-phosphate
  modified_base 4: mod_base = OTHER; note = 2'-O-methylcytidine-3'-phosphate
  modified_base 5: mod_base = OTHER; note = 2'-O-methyluridine-3'-phosphate
  modified_base 6: mod_base = OTHER; note = 2'-deoxy-2'-fluoroguanosine-3'-phosphate
  modified_base 7: mod_base = OTHER; note = 2'-O-methyladenosine-3'-phosphate
  modified_base 8: mod_base = OTHER; note = 2'-deoxy-2'-fluorouridine-3'-phosphate
  modified_base 9: mod_base = OTHER; note = 2'-deoxy-2'-fluoroadenosine-3'-phosphate
  modified_base 10: mod_base = OTHER; note = 2'-O-methyladenosine-3'-phosphate
  modified_base 11: mod_base = OTHER; note = 2'-O-methyluridine-3'-phosphate
  modified_base 12: mod_base = OTHER; note = 2'-O-methyladenosine-3'-phosphate
  modified_base 13: mod_base = OTHER; note = 2'-O-methylcytidine-3'-phosphate
  modified_base 14: mod_base = OTHER; note = 2'-deoxy-2'-fluorouridine-3'-phosphate
  modified_base 15: mod_base = OTHER; note = 2'-O-methyluridine-3'-phosphate
  modified_base 16: mod_base = OTHER; note = 2'-deoxy-2'-fluorocytidine-3'-phosphate
  modified_base 17: mod_base = OTHER; note = 2'-O-methylguanosine-3'-phosphate
  modified_base 18: mod_base = OTHER; note = 2'-O-methylcytidine-3'-phosphate
  modified_base 19: mod_base = OTHER; note = 2'-O-methylcytidine-3'-phosphate
  modified_base 20: mod_base = OTHER; note = 2'-O-methyluridine-3'-phosphate
  modified_base 21: mod_base = OTHER; note = 2'-O-methylcytidine-3'-phosphorothioate
  modified_base 22: mod_base = OTHER; note = 2'-O-methyluridine-3'-phosphorothioate
  modified_base 23: mod_base = OTHER; note = 2'-O-methyluridine
aagctgataatacttcgcctctt

SEQ ID NO: 1280 - RNA, 23 nt, synthetic construct
  source 1..23: mol_type = other RNA
  modified_base 1: mod_base = OTHER; note = 2'-O-methyladenosine-3'-phosphorothioate
  modified_base 2: mod_base = OTHER; note = 2'-deoxy-2'-fluoroadenosine-3'-phosphorothioate
  modified_base 3: mod_base = OTHER; note = 2'-O-methyladenosine-3'-phosphate
  modified_base 4: mod_base = OTHER; note = 2'-O-methylcytidine-3'-phosphate
  modified_base 5: mod_base = OTHER; note = 2'-O-methyladenosine-3'-phosphate
  modified_base 6: mod_base = OTHER; note = 2'-deoxy-2'-fluorouridine-3'-phosphate
  modified_base 7: mod_base = OTHER; note = 2'-O-methylcytidine-3'-phosphate
  modified_base 8: mod_base = OTHER; note = 2'-deoxy-2'-fluorouridine-3'-phosphate
  modified_base 9: mod_base = OTHER; note = 2'-deoxy-2'-fluorocytidine-3'-phosphate
  modified_base 10: mod_base = OTHER; note = 2'-O-methyladenosine-3'-phosphate
  modified_base 11: mod_base = OTHER; note = 2'-O-methylguanosine-3'-phosphate
  modified_base 12: mod_base = OTHER; note = 2'-O-methylcytidine-3'-phosphate
  modified_base 13: mod_base = OTHER; note = 2'-O-methyluridine-3'-phosphate
  modified_base 14: mod_base = OTHER; note = 2'-deoxy-2'-fluoroguanosine-3'-phosphate
  modified_base 15: mod_base = OTHER; note = 2'-O-methyladenosine-3'-phosphate
  modified_base 16: mod_base = OTHER; note = 2'-deoxy-2'-fluorouridine-3'-phosphate
  modified_base 17: mod_base = OTHER; note = 2'-O-methyladenosine-3'-phosphate
  modified_base 18: mod_base = OTHER; note = 2'-O-methyladenosine-3'-phosphate
  modified_base 19: mod_base = OTHER; note = 2'-O-methyluridine-3'-phosphate
  modified_base 20: mod_base = OTHER; note = 2'-O-methyladenosine-3'-phosphate
  modified_base 21: mod_base = OTHER; note = 2'-O-methylcytidine-3'-phosphorothioate
  modified_base 22: mod_base = OTHER; note = 2'-O-methyluridine-3'-phosphorothioate
  modified_base 23: mod_base = OTHER; note = 2'-O-methyluridine
aaacatctcagctgataatactt

SEQ ID NO: 1281 - RNA, 23 nt, synthetic construct
  source 1..23: mol_type = other RNA
  modified_base 1: mod_base = OTHER; note = 2'-O-methyladenosine-3'-phosphorothioate
  modified_base 2: mod_base = OTHER; note = 2'-deoxy-2'-fluorocytidine-3'-phosphorothioate
  modified_base 3: mod_base = OTHER; note = 2'-O-methyluridine-3'-phosphate
  modified_base 4: mod_base = OTHER; note = 2'-O-methylguanosine-3'-phosphate
  modified_base 5: mod_base = OTHER; note = 2'-O-methylcytidine-3'-phosphate
  modified_base 6: mod_base = OTHER; note = 2'-deoxy-2'-fluorouridine-3'-phosphate
  modified_base 7: mod_base = OTHER; note = 2'-O-methylguanosine-3'-phosphate
  modified_base 8: mod_base = OTHER; note = 2'-deoxy-2'-fluorouridine-3'-phosphate
  modified_base 9: mod_base = OTHER; note = 2'-deoxy-2'-fluoroguanosine-3'-phosphate
  modified_base 10: mod_base = OTHER; note = 2'-O-methyluridine-3'-phosphate
  modified_base 11: mod_base = OTHER; note = 2'-O-methyladenosine-3'-phosphate
  modified_base 12: mod_base = OTHER; note = 2'-O-methylguanosine-3'-phosphate
  modified_base 13: mod_base = OTHER; note = 2'-O-methyladenosine-3'-phosphate
  modified_base 14: mod_base = OTHER; note = 2'-deoxy-2'-fluoroguanosine-3'-phosphate
  modified_base 15: mod_base = OTHER; note = 2'-O-methyluridine-3'-phosphate
  modified_base 16: mod_base = OTHER; note = 2'-deoxy-2'-fluoroadenosine-3'-phosphate
  modified_base 17: mod_base = OTHER; note = 2'-O-methyluridine-3'-phosphate
  modified_base 18: mod_base = OTHER; note = 2'-O-methyladenosine-3'-phosphate
  modified_base 19: mod_base = OTHER; note = 2'-O-methylguanosine-3'-phosphate
  modified_base 20: mod_base = OTHER; note = 2'-O-methyladenosine-3'-phosphate
  modified_base 21: mod_base = OTHER; note = 2'-O-methylguanosine-3'-phosphorothioate
  modified_base 22: mod_base = OTHER; note = 2'-O-methylguanosine-3'-phosphorothioate
  modified_base 23: mod_base = OTHER; note = 2'-O-methylguanosine
actgctgtgtagagtatagaggg

SEQ ID NO: 1282 - RNA, 23 nt, synthetic construct
  source 1..23: mol_type = other RNA
  modified_base 1: mod_base = OTHER; note = 2'-O-methyladenosine-3'-phosphorothioate
  modified_base 2: mod_base = OTHER; note = 2'-deoxy-2'-fluoroadenosine-3'-phosphorothioate
  modified_base 3: mod_base = OTHER; note = 2'-O-methyluridine-3'-phosphate
  modified_base 4: mod_base = OTHER; note = 2'-O-methyluridine-3'-phosphate
  modified_base 5: mod_base = OTHER; note = 2'-O-methylcytidine-3'-phosphate
  modified_base 6: mod_base = OTHER; note = 2'-deoxy-2'-fluoroadenosine-3'-phosphate
  modified_base 7: mod_base = OTHER; note = 2'-O-methylcytidine-3'-phosphate
  modified_base 8: mod_base = OTHER; note = 2'-deoxy-2'-fluoroguanosine-3'-phosphate
  modified_base 9: mod_base = OTHER; note = 2'-deoxy-2'-fluorocytidine-3'-phosphate
  modified_base 10: mod_base = OTHER; note = 2'-O-methyluridine-3'-phosphate
  modified_base 11: mod_base = OTHER; note = 2'-O-methylguanosine-3'-phosphate
  modified_base 12: mod_base = OTHER; note = 2'-O-methylcytidine-3'-phosphate
  modified_base 13: mod_base = OTHER; note = 2'-O-methyluridine-3'-phosphate
  modified_base 14: mod_base = OTHER; note = 2'-deoxy-2'-fluoroguanosine-3'-phosphate
  modified_base 15: mod_base = OTHER; note = 2'-O-methyluridine-3'-phosphate
  modified_base 16: mod_base = OTHER; note = 2'-deoxy-2'-fluoroguanosine-3'-phosphate
  modified_base 17: mod_base = OTHER; note = 2'-O-methyluridine-3'-phosphate
  modified_base 18: mod_base = OTHER; note = 2'-O-methyladenosine-3'-phosphate
  modified_base 19: mod_base = OTHER; note = 2'-O-methylguanosine-3'-phosphate
  modified_base 20: mod_base = OTHER; note = 2'-O-methyladenosine-3'-phosphate
  modified_base 21: mod_base = OTHER; note = 2'-O-methylguanosine-3'-phosphorothioate
  modified_base 22: mod_base = OTHER; note = 2'-O-methyluridine-3'-phosphorothioate
  modified_base 23: mod_base = OTHER; note = 2'-O-methyladenosine
aattcacgctgctgtgtagagta

SEQ ID NO: 1283 - RNA, 23 nt, synthetic construct
  source 1..23: mol_type = other RNA
  modified_base 1: mod_base = OTHER; note = 2'-O-methyladenosine-3'-phosphorothioate
  modified_base 2: mod_base = OTHER; note = 2'-deoxy-2'-fluorocytidine-3'-phosphorothioate
  modified_base 3: mod_base = OTHER; note = 2'-O-methylcytidine-3'-phosphate
  modified_base 4: mod_base = OTHER; note = 2'-O-methyluridine-3'-phosphate
  modified_base 5: mod_base = OTHER; note = 2'-O-methyluridine-3'-phosphate
  modified_base 6: mod_base = OTHER; note = 2'-deoxy-2'-fluorouridine-3'-phosphate
  modified_base 7: mod_base = OTHER; note = 2'-O-methyladenosine-3'-phosphate
  modified_base 8: mod_base = OTHER; note = 2'-deoxy-2'-fluorouridine-3'-phosphate
  modified_base 9: mod_base = OTHER; note = 2'-deoxy-2'-fluorocytidine-3'-phosphate
  modified_base 10: mod_base = OTHER; note = 2'-O-methyladenosine-3'-phosphate
  modified_base 11: mod_base = OTHER; note = 2'-O-methyluridine-3'-phosphate
  modified_base 12: mod_base = OTHER; note = 2'-O-methyluridine-3'-phosphate
  modified_base 13: mod_base = OTHER; note = 2'-O-methylcytidine-3'-phosphate
  modified_base 14: mod_base = OTHER; note = 2'-deoxy-2'-fluoroadenosine-3'-phosphate
  modified_base 15: mod_base = OTHER; note = 2'-O-methylcytidine-3'-phosphate
  modified_base 16: mod_base = OTHER; note = 2'-deoxy-2'-fluoroguanosine-3'-phosphate
  modified_base 17: mod_base = OTHER; note = 2'-O-methylcytidine-3'-phosphate
  modified_base 18: mod_base = OTHER; note = 2'-O-methyluridine-3'-phosphate
  modified_base 19: mod_base = OTHER; note = 2'-O-methylguanosine-3'-phosphate
  modified_base 20: mod_base = OTHER; note = 2'-O-methylcytidine-3'-phosphate
  modified_base 21: mod_base = OTHER; note = 2'-O-methyluridine-3'-phosphorothioate
  modified_base 22: mod_base = OTHER; note = 2'-O-methylguanosine-3'-phosphorothioate
  modified_base 23: mod_base = OTHER; note = 2'-O-methyluridine
acctttatcattcacgctgctgt

SEQ ID NO: 1284 - RNA, 23 nt, synthetic construct
  source 1..23: mol_type = other RNA
  modified_base 1: mod_base = OTHER; note = 2'-O-methyladenosine-3'-phosphorothioate
  modified_base 2: mod_base = OTHER; note = 2'-deoxy-2'-fluoroadenosine-3'-phosphorothioate
  modified_base 3: mod_base = OTHER; note = 2'-O-methylcytidine-3'-phosphate
  modified_base 4: mod_base = OTHER; note = 2'-O-methyluridine-3'-phosphate
  modified_base 5: mod_base = OTHER; note = 2'-O-methylcytidine-3'-phosphate
  modified_base 6: mod_base = OTHER; note = 2'-deoxy-2'-fluorouridine-3'-phosphate
  modified_base 7: mod_base = OTHER; note = 2'-O-methylcytidine-3'-phosphate
  modified_base 8: mod_base = OTHER; note = 2'-deoxy-2'-fluoroadenosine-3'-phosphate
  modified_base 9: mod_base = OTHER; note = 2'-deoxy-2'-fluoroguanosine-3'-phosphate
  modified_base 10: mod_base = OTHER; note = 2'-O-methylcytidine-3'-phosphate
  modified_base 11: mod_base = OTHER; note = 2'-O-methylcytidine-3'-phosphate
  modified_base 12: mod_base = OTHER; note = 2'-O-methylcytidine-3'-phosphate
  modified_base 13: mod_base = OTHER; note = 2'-O-methyluridine-3'-phosphate
  modified_base 14: mod_base = OTHER; note = 2'-deoxy-2'-fluorouridine-3'-phosphate
  modified_base 15: mod_base = OTHER; note = 2'-O-methyluridine-3'-phosphate
  modified_base 16: mod_base = OTHER; note = 2'-deoxy-2'-fluoroadenosine-3'-phosphate
  modified_base 17: mod_base = OTHER; note = 2'-O-methyluridine-3'-phosphate
  modified_base 18: mod_base = OTHER; note = 2'-O-methylcytidine-3'-phosphate
  modified_base 19: mod_base = OTHER; note = 2'-O-methyladenosine-3'-phosphate
  modified_base 20: mod_base = OTHER; note = 2'-O-methyluridine-3'-phosphate
  modified_base 21: mod_base = OTHER; note = 2'-O-methyluridine-3'-phosphorothioate
  modified_base 22: mod_base = OTHER; note = 2'-O-methylcytidine-3'-phosphorothioate
  modified_base 23: mod_base = OTHER; note = 2'-O-methyladenosine
aactctcagccctttatcattca

SEQ ID NO: 1285 - RNA, 23 nt, synthetic construct
  source 1..23: mol_type = other RNA
  modified_base 1: mod_base = OTHER; note = 2'-O-methyladenosine-3'-phosphorothioate
  modified_base 2: mod_base = OTHER; note = 2'-deoxy-2'-fluorouridine-3'-phosphorothioate
  modified_base 3: mod_base = OTHER; note = 2'-O-methylcytidine-3'-phosphate
  modified_base 4: mod_base = OTHER; note = 2'-O-methyluridine-3'-phosphate
  modified_base 5: mod_base = OTHER; note = 2'-O-methyluridine-3'-phosphate
  modified_base 6: mod_base = OTHER; note = 2'-deoxy-2'-fluorocytidine-3'-phosphate
  modified_base 7: mod_base = OTHER; note = 2'-O-methylcytidine-3'-phosphate
  modified_base 8: mod_base = OTHER; note = 2'-deoxy-2'-fluoroadenosine-3'-phosphate
  modified_base 9: mod_base = OTHER; note = 2'-deoxy-2'-fluoroguanosine-3'-phosphate
  modified_base 10: mod_base = OTHER; note = 2'-O-methylguanosine-3'-phosphate
  modified_base 11: mod_base = OTHER; note = 2'-O-methyladenosine-3'-phosphate
  modified_base 12: mod_base = OTHER; note = 2'-O-methylcytidine-3'-phosphate
  modified_base 13: mod_base = OTHER; note = 2'-O-methyluridine-3'-phosphate
  modified_base 14: mod_base = OTHER; note = 2'-deoxy-2'-fluorocytidine-3'-phosphate
  modified_base 15: mod_base = OTHER; note = 2'-O-methyluridine-3'-phosphate
  modified_base 16: mod_base = OTHER; note = 2'-deoxy-2'-fluorocytidine-3'-phosphate
  modified_base 17: mod_base = OTHER; note = 2'-O-methyladenosine-3'-phosphate
  modified_base 18: mod_base = OTHER; note = 2'-O-methylguanosine-3'-phosphate
  modified_base 19: mod_base = OTHER; note = 2'-O-methylcytidine-3'-phosphate
  modified_base 20: mod_base = OTHER; note = 2'-O-methylcytidine-3'-phosphate
  modified_base 21: mod_base = OTHER; note = 2'-O-methylcytidine-3'-phosphorothioate
  modified_base 22: mod_base = OTHER; note = 2'-O-methyluridine-3'-phosphorothioate
  modified_base 23: mod_base = OTHER; note = 2'-O-methyluridine
atcttccaggactctcagccctt

SEQ ID NO: 1286 - RNA, 23 nt, synthetic construct
  source 1..23: mol_type = other RNA
  modified_base 1: mod_base = OTHER; note = 2'-O-methyladenosine-3'-phosphorothioate
  modified_base 2: mod_base = OTHER; note = 2'-deoxy-2'-fluorocytidine-3'-phosphorothioate
  modified_base 3: mod_base = OTHER; note = 2'-O-methyluridine-3'-phosphate
  modified_base 4: mod_base = OTHER; note = 2'-O-methylguanosine-3'-phosphate
  modified_base 5: mod_base = OTHER; note = 2'-O-methyladenosine-3'-phosphate
  modified_base 6: mod_base = OTHER; note = 2'-deoxy-2'-fluoroadenosine-3'-phosphate
  modified_base 7: mod_base = OTHER; note = 2'-O-methyluridine-3'-phosphate
  modified_base 8: mod_base = OTHER; note = 2'-deoxy-2'-fluorouridine-3'-phosphate
  modified_base 9: mod_base = OTHER; note = 2'-deoxy-2'-fluoroguanosine-3'-phosphate
  modified_base 10: mod_base = OTHER; note = 2'-O-methyluridine-3'-phosphate
  modified_base 11: mod_base = OTHER; note = 2'-O-methylcytidine-3'-phosphate
  modified_base 12: mod_base = OTHER; note = 2'-O-methyluridine-3'-phosphate
  modified_base 13: mod_base = OTHER; note = 2'-O-methyluridine-3'-phosphate
  modified_base 14: mod_base = OTHER; note = 2'-deoxy-2'-fluorocytidine-3'-phosphate
  modified_base 15: mod_base = OTHER; note = 2'-O-methylcytidine-3'-phosphate
  modified_base 16: mod_base = OTHER; note = 2'-deoxy-2'-fluoroadenosine-3'-phosphate
  modified_base 17: mod_base = OTHER; note = 2'-O-methylguanosine-3'-phosphate
  modified_base 18: mod_base = OTHER; note = 2'-O-methylguanosine-3'-phosphate
  modified_base 19: mod_base = OTHER; note = 2'-O-methyladenosine-3'-phosphate
  modified_base 20: mod_base = OTHER; note = 2'-O-methylcytidine-3'-phosphate
  modified_base 21: mod_base = OTHER; note = 2'-O-methyluridine-3'-phosphorothioate
  modified_base 22: mod_base = OTHER; note = 2'-O-methylcytidine-3'-phosphorothioate
  modified_base 23: mod_base = OTHER; note = 2'-O-methyluridine
actgaattgtcttccaggactct

SEQ ID NO: 1287 - RNA, 23 nt, synthetic construct
  source 1..23: mol_type = other RNA
  modified_base 1: mod_base = OTHER; note = 2'-O-methyladenosine-3'-phosphorothioate
  modified_base 2: mod_base = OTHER; note = 2'-deoxy-2'-fluoroadenosine-3'-phosphorothioate
  modified_base 3: mod_base = OTHER; note = 2'-O-methyluridine-3'-phosphate
  modified_base 4: mod_base = OTHER; note = 2'-O-methylcytidine-3'-phosphate
  modified_base 5: mod_base = OTHER; note = 2'-O-methylcytidine-3'-phosphate
  modified_base 6: mod_base = OTHER; note = 2'-deoxy-2'-fluoroadenosine-3'-phosphate
  modified_base 7: mod_base = OTHER; note = 2'-O-methyladenosine-3'-phosphate
  modified_base 8: mod_base = OTHER; note = 2'-deoxy-2'-fluoroadenosine-3'-phosphate
  modified_base 9: mod_base = OTHER; note = 2'-deoxy-2'-fluoroguanosine-3'-phosphate
  modified_base 10: mod_base = OTHER; note = 2'-O-methylcytidine-3'-phosphate
  modified_base 11: mod_base = OTHER; note = 2'-O-methyluridine-3'-phosphate
  modified_base 12: mod_base = OTHER; note = 2'-O-methylguanosine-3'-phosphate
  modified_base 13: mod_base = OTHER; note = 2'-O-methyladenosine-3'-phosphate
  modified_base 14: mod_base = OTHER; note = 2'-deoxy-2'-fluoroadenosine-3'-phosphate
  modified_base 15: mod_base = OTHER; note = 2'-O-methyluridine-3'-phosphate
  modified_base 16: mod_base = OTHER; note = 2'-deoxy-2'-fluorouridine-3'-phosphate
  modified_base 17: mod_base = OTHER; note = 2'-O-methylguanosine-3'-phosphate
  modified_base 18: mod_base = OTHER; note = 2'-O-methyluridine-3'-phosphate
  modified_base 19: mod_base = OTHER; note = 2'-O-methylcytidine-3'-phosphate
  modified_base 20: mod_base = OTHER; note = 2'-O-methyluridine-3'-phosphate
  modified_base 21: mod_base = OTHER; note = 2'-O-methyluridine-3'-phosphorothioate
  modified_base 22: mod_base = OTHER; note = 2'-O-methylcytidine-3'-phosphorothioate
  modified_base 23: mod_base = OTHER; note = 2'-O-methylcytidine
aatccaaagctgaattgtcttcc

SEQ ID NO: 1288 - RNA, 23 nt, synthetic construct
  source 1..23: mol_type = other RNA
  modified_base 1: mod_base = OTHER; note = 2'-O-methyladenosine-3'-phosphorothioate
  modified_base 2: mod_base = OTHER; note = 2'-deoxy-2'-fluoroadenosine-3'-phosphorothioate
  modified_base 3: mod_base = OTHER; note = 2'-O-methylguanosine-3'-phosphate
  modified_base 4: mod_base = OTHER; note = 2'-O-methylcytidine-3'-phosphate
  modified_base 5: mod_base = OTHER; note = 2'-O-methyladenosine-3'-phosphate
  modified_base 6: mod_base = OTHER; note = 2'-deoxy-2'-fluorouridine-3'-phosphate
  modified_base 7: mod_base = OTHER; note = 2'-O-methyluridine-3'-phosphate
  modified_base 8: mod_base = OTHER; note = 2'-deoxy-2'-fluorouridine-3'-phosphate
  modified_base 9: mod_base = OTHER; note = 2'-deoxy-2'-fluorouridine-3'-phosphate
  modified_base 10: mod_base = OTHER; note = 2'-O-methyladenosine-3'-phosphate
  modified_base 11: mod_base = OTHER; note = 2'-O-methyluridine-3'-phosphate
  modified_base 12: mod_base = OTHER; note = 2'-O-methylcytidine-3'-phosphate
  modified_base 13: mod_base = OTHER; note = 2'-O-methylcytidine-3'-phosphate
  modified_base 14: mod_base = OTHER; note = 2'-deoxy-2'-fluoroadenosine-3'-phosphate
  modified_base 15: mod_base = OTHER; note = 2'-O-methyladenosine-3'-phosphate
  modified_base 16: mod_base = OTHER; note = 2'-deoxy-2'-fluoroadenosine-3'-phosphate
  modified_base 17: mod_base = OTHER; note = 2'-O-methylguanosine-3'-phosphate
  modified_base 18: mod_base = OTHER; note = 2'-O-methylcytidine-3'-phosphate
  modified_base 19: mod_base = OTHER; note = 2'-O-methyluridine-3'-phosphate
  modified_base 20: mod_base = OTHER; note = 2'-O-methylguanosine-3'-phosphate
  modified_base 21: mod_base = OTHER; note = 2'-O-methyladenosine-3'-phosphorothioate
  modified_base 22: mod_base = OTHER; note = 2'-O-methyladenosine-3'-phosphorothioate
  modified_base 23: mod_base = OTHER; note = 2'-O-methyluridine
aagcattttatccaaagctgaat

SEQ ID NO: 1289 - RNA, 23 nt, synthetic construct
  source 1..23: mol_type = other RNA
  modified_base 1: mod_base = OTHER; note = 2'-O-methyladenosine-3'-phosphorothioate
  modified_base 2: mod_base = OTHER; note = 2'-deoxy-2'-fluoroadenosine-3'-phosphorothioate
  modified_base 3: mod_base = OTHER; note = 2'-O-methylcytidine-3'-phosphate
  modified_base 4: mod_base = OTHER; note = 2'-O-methyladenosine-3'-phosphate
  modified_base 5: mod_base = OTHER; note = 2'-O-methyluridine-3'-phosphate
  modified_base 6: mod_base = OTHER; note = 2'-deoxy-2'-fluorouridine-3'-phosphate
  modified_base 7: mod_base = OTHER; note = 2'-O-methylcytidine-3'-phosphate
  modified_base 8: mod_base = OTHER; note = 2'-deoxy-2'-fluorouridine-3'-phosphate
  modified_base 9: mod_base = OTHER; note = 2'-deoxy-2'-fluoroguanosine-3'-phosphate
  modified_base 10: mod_base = OTHER; note = 2'-O-methylcytidine-3'-phosphate
  modified_base 11: mod_base = OTHER; note = 2'-O-methyladenosine-3'-phosphate
  modified_base 12: mod_base = OTHER; note = 2'-O-methylguanosine-3'-phosphate
  modified_base 13: mod_base = OTHER; note = 2'-O-methylcytidine-3'-phosphate
  modified_base 14: mod_base = OTHER; note = 2'-deoxy-2'-fluoroadenosine-3'-phosphate
  modified_base 15: mod_base = OTHER; note = 2'-O-methyluridine-3'-phosphate
  modified_base 16: mod_base = OTHER; note = 2'-deoxy-2'-fluorouridine-3'-phosphate
  modified_base 17: mod_base = OTHER; note = 2'-O-methyluridine-3'-phosphate
  modified_base 18: mod_base = OTHER; note = 2'-O-methyluridine-3'-phosphate
  modified_base 19: mod_base = OTHER; note = 2'-O-methyladenosine-3'-phosphate
  modified_base 20: mod_base = OTHER; note = 2'-O-methyluridine-3'-phosphate
  modified_base 21: mod_base = OTHER; note = 2'-O-methylcytidine-3'-phosphorothioate
  modified_base 22: mod_base = OTHER; note = 2'-O-methylcytidine-3'-phosphorothioate
  modified_base 23: mod_base = OTHER; note = 2'-O-methyladenosine
aacattctgcagcattttatcca

SEQ ID NO: 1290 - RNA, 23 nt, synthetic construct
  source 1..23: mol_type = other RNA
  modified_base 1: mod_base = OTHER; note = 2'-O-methyladenosine-3'-phosphorothioate
  modified_base 2: mod_base = OTHER; note = 2'-deoxy-2'-fluoroadenosine-3'-phosphorothioate
  modified_base 3: mod_base = OTHER; note = 2'-O-methyluridine-3'-phosphate
  modified_base 4: mod_base = OTHER; note = 2'-O-methylcytidine-3'-phosphate
  modified_base 5: mod_base = OTHER; note = 2'-O-methyluridine-3'-phosphate
  modified_base 6: mod_base = OTHER; note = 2'-deoxy-2'-fluoroguanosine-3'-phosphate
  modified_base 7: mod_base = OTHER; note = 2'-O-methylguanosine-3'-phosphate
  modified_base 8: mod_base = OTHER; note = 2'-deoxy-2'-fluoroadenosine-3'-phosphate
  modified_base 9: mod_base = OTHER; note = 2'-deoxy-2'-fluorocytidine-3'-phosphate
  modified_base 10: mod_base = OTHER; note = 2'-O-methyladenosine-3'-phosphate
  modified_base 11: mod_base = OTHER; note = 2'-O-methyluridine-3'-phosphate
  modified_base 12: mod_base = OTHER; note = 2'-O-methyluridine-3'-phosphate
  modified_base 13: mod_base = OTHER; note = 2'-O-methylcytidine-3'-phosphate
  modified_base 14: mod_base = OTHER; note = 2'-deoxy-2'-fluorouridine-3'-phosphate
  modified_base 15: mod_base = OTHER; note = 2'-O-methylguanosine-3'-phosphate
  modified_base 16: mod_base = OTHER; note = 2'-deoxy-2'-fluorocytidine-3'-phosphate
  modified_base 17: mod_base = OTHER; note = 2'-O-methyladenosine-3'-phosphate
  modified_base 18: mod_base = OTHER; note = 2'-O-methylguanosine-3'-phosphate
  modified_base 19: mod_base = OTHER; note = 2'-O-methylcytidine-3'-phosphate
  modified_base 20: mod_base = OTHER; note = 2'-O-methyladenosine-3'-phosphate
  modified_base 21: mod_base = OTHER; note = 2'-O-methyluridine-3'-phosphorothioate
  modified_base 22: mod_base = OTHER; note = 2'-O-methyluridine-3'-phosphorothioate
  modified_base 23: mod_base = OTHER; note = 2'-O-methyluridine
aatctggacattctgcagcattt

SEQ ID NO: 1291 - RNA, 23 nt, synthetic construct
  source 1..23: mol_type = other RNA
  modified_base 1: mod_base = OTHER; note = 2'-O-methyladenosine-3'-phosphorothioate
  modified_base 2: mod_base = OTHER; note = 2'-deoxy-2'-fluorouridine-3'-phosphorothioate
  modified_base 3: mod_base = OTHER; note = 2'-O-methyluridine-3'-phosphate
  modified_base 4: mod_base = OTHER; note = 2'-O-methylcytidine-3'-phosphate
  modified_base 5: mod_base = OTHER; note = 2'-O-methyladenosine-3'-phosphate
  modified_base 6: mod_base = OTHER; note = 2'-deoxy-2'-fluoroadenosine-3'-phosphate
  modified_base 7: mod_base = OTHER; note = 2'-O-methyladenosine-3'-phosphate
  modified_base 8: mod_base = OTHER; note = 2'-deoxy-2'-fluoroadenosine-3'-phosphate
  modified_base 9: mod_base = OTHER; note = 2'-deoxy-2'-fluorouridine-3'-phosphate
  modified_base 10: mod_base = OTHER; note = 2'-O-methyladenosine-3'-phosphate
  modified_base 11: mod_base = OTHER; note = 2'-O-methyladenosine-3'-phosphate
  modified_base 12: mod_base = OTHER; note = 2'-O-methyluridine-3'-phosphate
  modified_base 13: mod_base = OTHER; note = 2'-O-methylguanosine-3'-phosphate
  modified_base 14: mod_base = OTHER; note = 2'-deoxy-2'-fluoroadenosine-3'-phosphate
  modified_base 15: mod_base = OTHER; note = 2'-O-methyladenosine-3'-phosphate
  modified_base 16: mod_base = OTHER; note = 2'-deoxy-2'-fluoroguanosine-3'-phosphate
  modified_base 17: mod_base = OTHER; note = 2'-O-methyluridine-3'-phosphate
  modified_base 18: mod_base = OTHER; note = 2'-O-methylcytidine-3'-phosphate
  modified_base 19: mod_base = OTHER; note = 2'-O-methylcytidine-3'-phosphate
  modified_base 20: mod_base = OTHER; note = 2'-O-methyladenosine-3'-phosphate
  modified_base 21: mod_base = OTHER; note = 2'-O-methylguanosine-3'-phosphorothioate
  modified_base 22: mod_base = OTHER; note = 2'-O-methyluridine-3'-phosphorothioate
  modified_base 23: mod_base = OTHER; note = 2'-O-methyluridine
attcaaaataatgaagtccagtt

SEQ ID NO: 1292 - RNA, 23 nt, synthetic construct
  source 1..23: mol_type = other RNA
  modified_base 1: mod_base = OTHER; note = 2'-O-methyladenosine-3'-phosphorothioate
  modified_base 2: mod_base = OTHER; note = 2'-deoxy-2'-fluorocytidine-3'-phosphorothioate
  modified_base 3: mod_base = OTHER; note = 2'-O-methyluridine-3'-phosphate
  modified_base 4: mod_base = OTHER; note = 2'-O-methylguanosine-3'-phosphate
  modified_base 5: mod_base = OTHER; note = 2'-O-methyladenosine-3'-phosphate
  modified_base 6: mod_base = OTHER; note = 2'-deoxy-2'-fluorouridine-3'-phosphate
  modified_base 7: mod_base = OTHER; note = 2'-O-methyladenosine-3'-phosphate
  modified_base 8: mod_base = OTHER; note = 2'-deoxy-2'-fluorocytidine-3'-phosphate
  modified_base 9: mod_base = OTHER; note = 2'-deoxy-2'-fluorocytidine-3'-phosphate
  modified_base 10: mod_base = OTHER; note = 2'-O-methyladenosine-3'-phosphate
  modified_base 11: mod_base = OTHER; note = 2'-O-methyladenosine-3'-phosphate
  modified_base 12: mod_base = OTHER; note = 2'-O-methyladenosine-3'-phosphate
  modified_base 13: mod_base = OTHER; note = 2'-O-methyladenosine-3'-phosphate
  modified_base 14: mod_base = OTHER; note = 2'-deoxy-2'-fluorouridine-3'-phosphate
  modified_base 15: mod_base = OTHER; note = 2'-O-methyluridine-3'-phosphate
  modified_base 16: mod_base = OTHER; note = 2'-deoxy-2'-fluorouridine-3'-phosphate
  modified_base 17: mod_base = OTHER; note = 2'-O-methyluridine-3'-phosphate
  modified_base 18: mod_base = OTHER; note = 2'-O-methylguanosine-3'-phosphate
  modified_base 19: mod_base = OTHER; note = 2'-O-methyluridine-3'-phosphate
  modified_base 20: mod_base = OTHER; note = 2'-O-methyluridine-3'-phosphate
  modified_base 21: mod_base = OTHER; note = 2'-O-methyluridine-3'-phosphorothioate
  modified_base 22: mod_base = OTHER; note = 2'-O-methylcytidine-3'-phosphorothioate
  modified_base 23: mod_base = OTHER; note = 2'-O-methyladenosine
actgataccaaaattttgtttca

SEQ ID NO: 1293 - RNA, 23 nt, synthetic construct
  source 1..23: mol_type = other RNA
  modified_base 1: mod_base = OTHER; note = 2'-O-methyladenosine-3'-phosphorothioate
  modified_base 2: mod_base = OTHER; note = 2'-deoxy-2'-fluoroguanosine-3'-phosphorothioate
  modified_base 3: mod_base = OTHER; note = 2'-O-methylcytidine-3'-phosphate
  modified_base 4: mod_base = OTHER; note = 2'-O-methyladenosine-3'-phosphate
  modified_base 5: mod_base = OTHER; note = 2'-O-methyladenosine-3'-phosphate
  modified_base 6: mod_base = OTHER; note = 2'-deoxy-2'-fluoroguanosine-3'-phosphate
  modified_base 7: mod_base = OTHER; note = 2'-O-methyladenosine-3'-phosphate
  modified_base 8: mod_base = OTHER; note = 2'-deoxy-2'-fluorouridine-3'-phosphate
  modified_base 9: mod_base = OTHER; note = 2'-deoxy-2'-fluorocytidine-3'-phosphate
  modified_base 10: mod_base = OTHER; note = 2'-O-methyladenosine-3'-phosphate
  modified_base 11: mod_base = OTHER; note = 2'-O-methyluridine-3'-phosphate
  modified_base 12: mod_base = OTHER; note = 2'-O-methylcytidine-3'-phosphate
  modified_base 13: mod_base = OTHER; note = 2'-O-methyluridine-3'-phosphate
  modified_base 14: mod_base = OTHER; note = 2'-deoxy-2'-fluoroguanosine-3'-phosphate
  modified_base 15: mod_base = OTHER; note = 2'-O-methyladenosine-3'-phosphate
  modified_base 16: mod_base = OTHER; note = 2'-deoxy-2'-fluorouridine-3'-phosphate
  modified_base 17: mod_base = OTHER; note = 2'-O-methyladenosine-3'-phosphate
  modified_base 18: mod_base = OTHER; note = 2'-O-methylcytidine-3'-phosphate
  modified_base 19: mod_base = OTHER; note = 2'-O-methylcytidine-3'-phosphate
  modified_base 20: mod_base = OTHER; note = 2'-O-methyladenosine-3'-phosphate
  modified_base 21: mod_base = OTHER; note = 2'-O-methyladenosine-3'-phosphorothioate
  modified_base 22: mod_base = OTHER; note = 2'-O-methyladenosine-3'-phosphorothioate
  modified_base 23: mod_base = OTHER; note = 2'-O-methyladenosine
agcaagatcatctgataccaaaa

SEQ ID NO: 1294 - RNA, 23 nt, synthetic construct
  source 1..23: mol_type = other RNA
  modified_base 1: mod_base = OTHER; note = 2'-O-methyladenosine-3'-phosphorothioate
  modified_base 2: mod_base = OTHER; note = 2'-deoxy-2'-fluorouridine-3'-phosphorothioate
  modified_base 3: mod_base = OTHER; note = 2'-O-methylguanosine-3'-phosphate
  modified_base 4: mod_base = OTHER; note = 2'-O-methyladenosine-3'-phosphate
  modified_base 5: mod_base = OTHER; note = 2'-O-methylguanosine-3'-phosphate
  modified_base 6: mod_base = OTHER; note = 2'-deoxy-2'-fluoroguanosine-3'-phosphate
  modified_base 7: mod_base = OTHER; note = 2'-O-methyladenosine-3'-phosphate
  modified_base 8: mod_base = OTHER; note = 2'-deoxy-2'-fluoroguanosine-3'-phosphate
  modified_base 9: mod_base = OTHER; note = 2'-deoxy-2'-fluoroguanosine-3'-phosphate
  modified_base 10: mod_base = OTHER; note = 2'-O-methylcytidine-3'-phosphate
  modified_base 11: mod_base = OTHER; note = 2'-O-methyladenosine-3'-phosphate
  modified_base 12: mod_base = OTHER; note = 2'-O-methyladenosine-3'-phosphate
  modified_base 13: mod_base = OTHER; note = 2'-O-methylguanosine-3'-phosphate
  modified_base 14: mod_base = OTHER; note = 2'-deoxy-2'-fluoroadenosine-3'-phosphate
  modified_base 15: mod_base = OTHER; note = 2'-O-methyluridine-3'-phosphate
  modified_base 16: mod_base = OTHER; note = 2'-deoxy-2'-fluorocytidine-3'-phosphate
  modified_base 17: mod_base = OTHER; note = 2'-O-methyladenosine-3'-phosphate
  modified_base 18: mod_base = OTHER; note = 2'-O-methyluridine-3'-phosphate
  modified_base 19: mod_base = OTHER; note = 2'-O-methylcytidine-3'-phosphate
  modified_base 20: mod_base = OTHER; note = 2'-O-methyluridine-3'-phosphate
  modified_base 21: mod_base = OTHER; note = 2'-O-methylguanosine-3'-phosphorothioate
  modified_base 22: mod_base = OTHER; note = 2'-O-methyladenosine-3'-phosphorothioate
  modified_base 23: mod_base = OTHER; note = 2'-O-methyluridine
atgaggaggcaagatcatctgat

SEQ ID NO: 1295 - RNA, 23 nt, synthetic construct
  source 1..23: mol_type = other RNA
  modified_base 1: mod_base = OTHER; note = 2'-O-methyladenosine-3'-phosphorothioate
  modified_base 2: mod_base = OTHER; note = 2'-deoxy-2'-fluorouridine-3'-phosphorothioate
  modified_base 3: mod_base = OTHER; note = 2'-O-methylcytidine-3'-phosphate
  modified_base 4: mod_base = OTHER; note = 2'-O-methyladenosine-3'-phosphate
  modified_base 5: mod_base = OTHER; note = 2'-O-methyladenosine-3'-phosphate
  modified_base 6: mod_base = OTHER; note = 2'-deoxy-2'-fluoroadenosine-3'-phosphate
  modified_base 7: mod_base = OTHER; note = 2'-O-methyladenosine-3'-phosphate
  modified_base 8: mod_base = OTHER; note = 2'-deoxy-2'-fluorouridine-3'-phosphate
  modified_base 9: mod_base = OTHER; note = 2'-deoxy-2'-fluoroguanosine-3'-phosphate
  modified_base 10: mod_base = OTHER; note = 2'-O-methyladenosine-3'-phosphate
  modified_base 11: mod_base = OTHER; note = 2'-O-methylguanosine-3'-phosphate
  modified_base 12: mod_base = OTHER; note = 2'-O-methylguanosine-3'-phosphate
  modified_base 13: mod_base = OTHER; note = 2'-O-methyladenosine-3'-phosphate
  modified_base 14: mod_base = OTHER; note = 2'-deoxy-2'-fluoroguanosine-3'-phosphate
  modified_base 15: mod_base = OTHER; note = 2'-O-methylguanosine-3'-phosphate
  modified_base 16: mod_base = OTHER; note = 2'-deoxy-2'-fluorocytidine-3'-phosphate
  modified_base 17: mod_base = OTHER; note = 2'-O-methyladenosine-3'-phosphate
  modified_base 18: mod_base = OTHER; note = 2'-O-methyladenosine-3'-phosphate
  modified_base 19: mod_base = OTHER; note = 2'-O-methylguanosine-3'-phosphate
  modified_base 20: mod_base = OTHER; note = 2'-O-methyladenosine-3'-phosphate
  modified_base 21: mod_base = OTHER; note = 2'-O-methyluridine-3'-phosphorothioate
  modified_base 22: mod_base = OTHER; note = 2'-O-methylcytidine-3'-phosphorothioate
  modified_base 23: mod_base = OTHER; note = 2'-O-methyladenosine
atcaaaatgaggaggcaagatca

SEQ ID NO: 1296 - RNA, 23 nt, synthetic construct
  source 1..23: mol_type = other RNA
  modified_base 1: mod_base = OTHER; note = 2'-O-methyladenosine-3'-phosphorothioate
  modified_base 2: mod_base = OTHER; note = 2'-deoxy-2'-fluoroguanosine-3'-phosphorothioate
  modified_base 3: mod_base = OTHER; note = 2'-O-methyladenosine-3'-phosphate
  modified_base 4: mod_base = OTHER; note = 2'-O-methyluridine-3'-phosphate
  modified_base 5: mod_base = OTHER; note = 2'-O-methyluridine-3'-phosphate
  modified_base 6: mod_base = OTHER; note = 2'-deoxy-2'-fluorouridine-3'-phosphate
  modified_base 7: mod_base = OTHER; note = 2'-O-methyladenosine-3'-phosphate
  modified_base 8: mod_base = OTHER; note = 2'-deoxy-2'-fluorouridine-3'-phosphate
  modified_base 9: mod_base = OTHER; note = 2'-deoxy-2'-fluorocytidine-3'-phosphate
  modified_base 10: mod_base = OTHER; note = 2'-O-methyladenosine-3'-phosphate
  modified_base 11: mod_base = OTHER; note = 2'-O-methyladenosine-3'-phosphate
  modified_base 12: mod_base = OTHER; note = 2'-O-methyladenosine-3'-phosphate
  modified_base 13: mod_base = OTHER; note = 2'-O-methyladenosine-3'-phosphate
  modified_base 14: mod_base = OTHER; note = 2'-deoxy-2'-fluorouridine-3'-phosphate
  modified_base 15: mod_base = OTHER; note = 2'-O-methylguanosine-3'-phosphate
  modified_base 16: mod_base = OTHER; note = 2'-deoxy-2'-fluoroadenosine-3'-phosphate
  modified_base 17: mod_base = OTHER; note = 2'-O-methylguanosine-3'-phosphate
  modified_base 18: mod_base = OTHER; note = 2'-O-methylguanosine-3'-phosphate
  modified_base 19: mod_base = OTHER; note = 2'-O-methyladenosine-3'-phosphate
  modified_base 20: mod_base = OTHER; note = 2'-O-methylguanosine-3'-phosphate
  modified_base 21: mod_base = OTHER; note = 2'-O-methylguanosine-3'-phosphorothioate
  modified_base 22: mod_base = OTHER; note = 2'-O-methylcytidine-3'-phosphorothioate
  modified_base 23: mod_base = OTHER; note = 2'-O-methyladenosine
agatttatcaaaatgaggaggca

SEQ ID NO: 1297 - RNA, 23 nt, synthetic construct
  source 1..23: mol_type = other RNA
  modified_base 1: mod_base = OTHER; note = 2'-O-methyladenosine-3'-phosphorothioate
  modified_base 2: mod_base = OTHER; note = 2'-deoxy-2'-fluorouridine-3'-phosphorothioate
  modified_base 3: mod_base = OTHER; note = 2'-O-methyluridine-3'-phosphate
  modified_base 4: mod_base = OTHER; note = 2'-O-methylcytidine-3'-phosphate
  modified_base 5: mod_base = OTHER; note = 2'-O-methyluridine-3'-phosphate
  modified_base 6: mod_base = OTHER; note = 2'-deoxy-2'-fluorouridine-3'-phosphate
  modified_base 7: mod_base = OTHER; note = 2'-O-methylguanosine-3'-phosphate
  modified_base 8: mod_base = OTHER; note = 2'-deoxy-2'-fluoroguanosine-3'-phosphate
  modified_base 9: mod_base = OTHER; note = 2'-deoxy-2'-fluoroadenosine-3'-phosphate
  modified_base 10: mod_base = OTHER; note = 2'-O-methyluridine-3'-phosphate
  modified_base 11: mod_base = OTHER; note = 2'-O-methyluridine-3'-phosphate
  modified_base 12: mod_base = OTHER; note = 2'-O-methyluridine-3'-phosphate
  modified_base 13: mod_base = OTHER; note = 2'-O-methyladenosine-3'-phosphate
  modified_base 14: mod_base = OTHER; note = 2'-deoxy-2'-fluorouridine-3'-phosphate
  modified_base 15: mod_base = OTHER; note = 2'-O-methylcytidine-3'-phosphate
  modified_base 16: mod_base = OTHER; note = 2'-deoxy-2'-fluoroadenosine-3'-phosphate
  modified_base 17: mod_base = OTHER; note = 2'-O-methyladenosine-3'-phosphate
  modified_base 18: mod_base = OTHER; note = 2'-O-methyladenosine-3'-phosphate
  modified_base 19: mod_base = OTHER; note = 2'-O-methyladenosine-3'-phosphate
  modified_base 20: mod_base = OTHER; note = 2'-O-methyluridine-3'-phosphate
  modified_base 21: mod_base = OTHER; note = 2'-O-methylguanosine-3'-phosphorothioate
  modified_base 22: mod_base = OTHER; note = 2'-O-methyladenosine-3'-phosphorothioate
  modified_base 23: mod_base = OTHER; note = 2'-O-methylguanosine
attcttggatttatcaaaatgag

SEQ ID NO: 1298 - RNA, 23 nt, synthetic construct
  source 1..23: mol_type = other RNA
  modified_base 1: mod_base = OTHER; note = 2'-O-methyladenosine-3'-phosphorothioate
  modified_base 2: mod_base = OTHER; note = 2'-deoxy-2'-fluoroadenosine-3'-phosphorothioate
  modified_base 3: mod_base = OTHER; note = 2'-O-methylguanosine-3'-phosphate
  modified_base 4: mod_base = OTHER; note = 2'-O-methyladenosine-3'-phosphate
  modified_base 5: mod_base = OTHER; note = 2'-O-methylguanosine-3'-phosphate
  modified_base 6: mod_base = OTHER; note = 2'-deoxy-2'-fluoroguanosine-3'-phosphate
  modified_base 7: mod_base = OTHER; note = 2'-O-methyladenosine-3'-phosphate
  modified_base 8: mod_base = OTHER; note = 2'-deoxy-2'-fluorouridine-3'-phosphate
  modified_base 9: mod_base = OTHER; note = 2'-deoxy-2'-fluoroadenosine-3'-phosphate
  modified_base 10: mod_base = OTHER; note = 2'-O-methyluridine-3'-phosphate
  modified_base 11: mod_base = OTHER; note = 2'-O-methyluridine-3'-phosphate
  modified_base 12: mod_base = OTHER; note = 2'-O-methyluridine-3'-phosphate
  modified_base 13: mod_base = OTHER; note = 2'-O-methylcytidine-3'-phosphate
  modified_base 14: mod_base = OTHER; note = 2'-deoxy-2'-fluorouridine-3'-phosphate
  modified_base 15: mod_base = OTHER; note = 2'-O-methyluridine-3'-phosphate
  modified_base 16: mod_base = OTHER; note = 2'-deoxy-2'-fluoroguanosine-3'-phosphate
  modified_base 17: mod_base = OTHER; note = 2'-O-methylguanosine-3'-phosphate
  modified_base 18: mod_base = OTHER; note = 2'-O-methyladenosine-3'-phosphate
  modified_base 19: mod_base = OTHER; note = 2'-O-methyluridine-3'-phosphate
  modified_base 20: mod_base = OTHER; note = 2'-O-methyluridine-3'-phosphate
  modified_base 21: mod_base = OTHER; note = 2'-O-methyluridine-3'-phosphorothioate
  modified_base 22: mod_base = OTHER; note = 2'-O-methyladenosine-3'-phosphorothioate
  modified_base 23: mod_base = OTHER; note = 2'-O-methyluridine
aagaggatatttcttggatttat

SEQ ID NO: 1299 - RNA, 23 nt, synthetic construct
  source 1..23: mol_type = other RNA
  modified_base 1: mod_base = OTHER; note = 2'-O-methyladenosine-3'-phosphorothioate
  modified_base 2: mod_base = OTHER; note = 2'-deoxy-2'-fluoroadenosine-3'-phosphorothioate
  modified_base 3: mod_base = OTHER; note = 2'-O-methyladenosine-3'-phosphate
  modified_base 4: mod_base = OTHER; note = 2'-O-methyluridine-3'-phosphate
  modified_base 5: mod_base = OTHER; note = 2'-O-methyladenosine-3'-phosphate
  modified_base 6: mod_base = OTHER; note = 2'-deoxy-2'-fluoroguanosine-3'-phosphate
  modified_base 7: mod_base = OTHER; note = 2'-O-methyluridine-3'-phosphate
  modified_base 8: mod_base = OTHER; note = 2'-deoxy-2'-fluoroadenosine-3'-phosphate
  modified_base 9: mod_base = OTHER; note = 2'-deoxy-2'-fluoroguanosine-3'-phosphate
  modified_base 10: mod_base = OTHER; note = 2'-O-methyladenosine-3'-phosphate
  modified_base 11: mod_base = OTHER; note = 2'-O-methylguanosine-3'-phosphate
  modified_base 12: mod_base = OTHER; note = 2'-O-methylguanosine-3'-phosphate
  modified_base 13: mod_base = OTHER; note = 2'-O-methyladenosine-3'-phosphate
  modified_base 14: mod_base = OTHER; note = 2'-deoxy-2'-fluorouridine-3'-phosphate
  modified_base 15: mod_base = OTHER; note = 2'-O-methyladenosine-3'-phosphate
  modified_base 16: mod_base = OTHER; note = 2'-deoxy-2'-fluorouridine-3'-phosphate
  modified_base 17: mod_base = OTHER; note = 2'-O-methyluridine-3'-phosphate
  modified_base 18: mod_base = OTHER; note = 2'-O-methyluridine-3'-phosphate
  modified_base 19: mod_base = OTHER; note = 2'-O-methylcytidine-3'-phosphate
  modified_base 20: mod_base = OTHER; note = 2'-O-methyluridine-3'-phosphate
  modified_base 21: mod_base = OTHER; note = 2'-O-methyluridine-3'-phosphorothioate
  modified_base 22: mod_base = OTHER; note = 2'-O-methylguanosine-3'-phosphorothioate
  modified_base 23: mod_base = OTHER; note = 2'-O-methylguanosine
aaatagtagaggatatttcttgg

SEQ ID NO: 1300 - RNA, 23 nt, synthetic construct
  source 1..23: mol_type = other RNA
  modified_base 1: mod_base = OTHER; note = 2'-O-methyladenosine-3'-phosphorothioate
  modified_base 2: mod_base = OTHER; note = 2'-deoxy-2'-fluoroadenosine-3'-phosphorothioate
  modified_base 3: mod_base = OTHER; note = 2'-O-methyluridine-3'-phosphate
  modified_base 4: mod_base = OTHER; note = 2'-O-methyladenosine-3'-phosphate
  modified_base 5: mod_base = OTHER; note = 2'-O-methylcytidine-3'-phosphate
  modified_base 6: mod_base = OTHER; note = 2'-deoxy-2'-fluoroadenosine-3'-phosphate
  modified_base 7: mod_base = OTHER; note = 2'-O-methylcytidine-3'-phosphate
  modified_base 8: mod_base = OTHER; note = 2'-deoxy-2'-fluoroadenosine-3'-phosphate
  modified_base 9: mod_base = OTHER; note = 2'-deoxy-2'-fluorouridine-3'-phosphate
  modified_base 10: mod_base = OTHER; note = 2'-O-methylcytidine-3'-phosphate
  modified_base 11: mod_base = OTHER; note = 2'-O-methyluridine-3'-phosphate
  modified_base 12: mod_base = OTHER; note = 2'-O-methyladenosine-3'-phosphate
  modified_base 13: mod_base = OTHER; note = 2'-O-methyladenosine-3'-phosphate
  modified_base 14: mod_base = OTHER; note = 2'-deoxy-2'-fluorouridine-3'-phosphate
  modified_base 15: mod_base = OTHER; note = 2'-O-methyladenosine-3'-phosphate
  modified_base 16: mod_base = OTHER; note = 2'-deoxy-2'-fluoroguanosine-3'-phosphate
  modified_base 17: mod_base = OTHER; note = 2'-O-methyluridine-3'-phosphate
  modified_base 18: mod_base = OTHER; note = 2'-O-methyladenosine-3'-phosphate
  modified_base 19: mod_base = OTHER; note = 2'-O-methylguanosine-3'-phosphate
  modified_base 20: mod_base = OTHER; note = 2'-O-methyladenosine-3'-phosphate
  modified_base 21: mod_base = OTHER; note = 2'-O-methylguanosine-3'-phosphorothioate
  modified_base 22: mod_base = OTHER; note = 2'-O-methylguanosine-3'-phosphorothioate
  modified_base 23: mod_base = OTHER; note = 2'-O-methyladenosine
aatacacatctaatagtagagga

SEQ ID NO: 1301 - RNA, 23 nt, synthetic construct
  source 1..23: mol_type = other RNA
  modified_base 1: mod_base = OTHER; note = 2'-O-methyladenosine-3'-phosphorothioate
  modified_base 2: mod_base = OTHER; note = 2'-deoxy-2'-fluorouridine-3'-phosphorothioate
  modified_base 3: mod_base = OTHER; note = 2'-O-methylcytidine-3'-phosphate
  modified_base 4: mod_base = OTHER; note = 2'-O-methyladenosine-3'-phosphate
  modified_base 5: mod_base = OTHER; note = 2'-O-methylguanosine-3'-phosphate
  modified_base 6: mod_base = OTHER; note = 2'-deoxy-2'-fluorouridine-3'-phosphate
  modified_base 7: mod_base = OTHER; note = 2'-O-methylcytidine-3'-phosphate
  modified_base 8: mod_base = OTHER; note = 2'-deoxy-2'-fluorouridine-3'-phosphate
  modified_base 9: mod_base = OTHER; note = 2'-deoxy-2'-fluoroguanosine-3'-phosphate
  modified_base 10: mod_base = OTHER; note = 2'-O-methyladenosine-3'-phosphate
  modified_base 11: mod_base = OTHER; note = 2'-O-methyladenosine-3'-phosphate
  modified_base 12: mod_base = OTHER; note = 2'-O-methylguanosine-3'-phosphate
  modified_base 13: mod_base = OTHER; note = 2'-O-methyladenosine-3'-phosphate
  modified_base 14: mod_base = OTHER; note = 2'-deoxy-2'-fluorocytidine-3'-phosphate
  modified_base 15: mod_base = OTHER; note = 2'-O-methyladenosine-3'-phosphate
  modified_base 16: mod_base = OTHER; note = 2'-deoxy-2'-fluoroguanosine-3'-phosphate
  modified_base 17: mod_base = OTHER; note = 2'-O-methyluridine-3'-phosphate
  modified_base 18: mod_base = OTHER; note = 2'-O-methylguanosine-3'-phosphate
  modified_base 19: mod_base = OTHER; note = 2'-O-methyluridine-3'-phosphate
  modified_base 20: mod_base = OTHER; note = 2'-O-methylcytidine-3'-phosphate
  modified_base 21: mod_base = OTHER; note = 2'-O-methyluridine-3'-phosphorothioate
  modified_base 22: mod_base = OTHER; note = 2'-O-methylguanosine-3'-phosphorothioate
  modified_base 23: mod_base = OTHER; note = 2'-O-methylcytidine
atcagtctgaagacagtgtctgc

SEQ ID NO: 1302 - RNA, 23 nt, synthetic construct
  source 1..23: mol_type = other RNA
  modified_base 1: mod_base = OTHER; note = 2'-O-methyladenosine-3'-phosphorothioate
  modified_base 2: mod_base = OTHER; note = 2'-deoxy-2'-fluorocytidine-3'-phosphorothioate
  modified_base 3: mod_base = OTHER; note = 2'-O-methylcytidine-3'-phosphate
  modified_base 4: mod_base = OTHER; note = 2'-O-methylcytidine-3'-phosphate
  modified_base 5: mod_base = OTHER; note = 2'-O-methyladenosine-3'-phosphate
  modified_base 6: mod_base = OTHER; note = 2'-deoxy-2'-fluoroguanosine-3'-phosphate
  modified_base 7: mod_base = OTHER; note = 2'-O-methyluridine-3'-phosphate
  modified_base 8: mod_base = OTHER; note = 2'-deoxy-2'-fluorouridine-3'-phosphate
  modified_base 9: mod_base = OTHER; note = 2'-deoxy-2'-fluorocytidine-3'-phosphate
  modified_base 10: mod_base = OTHER; note = 2'-O-methyladenosine-3'-phosphate
  modified_base 11: mod_base = OTHER; note = 2'-O-methylguanosine-3'-phosphate
  modified_base 12: mod_base = OTHER; note = 2'-O-methyluridine-3'-phosphate
  modified_base 13: mod_base = OTHER; note = 2'-O-methylcytidine-3'-phosphate
  modified_base 14: mod_base = OTHER; note = 2'-deoxy-2'-fluorouridine-3'-phosphate
  modified_base 15: mod_base = OTHER; note = 2'-O-methylguanosine-3'-phosphate
  modified_base 16: mod_base = OTHER; note = 2'-deoxy-2'-fluoroadenosine-3'-phosphate
  modified_base 17: mod_base = OTHER; note = 2'-O-methyladenosine-3'-phosphate
  modified_base 18: mod_base = OTHER; note = 2'-O-methylguanosine-3'-phosphate
  modified_base 19: mod_base = OTHER; note = 2'-O-methyladenosine-3'-phosphate
  modified_base 20: mod_base = OTHER; note = 2'-O-methylcytidine-3'-phosphate
  modified_base 21: mod_base = OTHER; note = 2'-O-methyladenosine-3'-phosphorothioate
  modified_base 22: mod_base = OTHER; note = 2'-O-methylguanosine-3'-phosphorothioate
  modified_base 23: mod_base = OTHER; note = 2'-O-methyluridine
acccagttcagtctgaagacagt

SEQ ID NO: 1303 - RNA, 23 nt, synthetic construct
  source 1..23: mol_type = other RNA
  modified_base 1: mod_base = OTHER; note = 2'-O-methyladenosine-3'-phosphorothioate
  modified_base 2: mod_base = OTHER; note = 2'-deoxy-2'-fluorouridine-3'-phosphorothioate
  modified_base 3: mod_base = OTHER; note = 2'-O-methyladenosine-3'-phosphate
  modified_base 4: mod_base = OTHER; note = 2'-O-methyladenosine-3'-phosphate
  modified_base 5: mod_base = OTHER; note = 2'-O-methylguanosine-3'-phosphate
  modified_base 6: mod_base = OTHER; note = 2'-deoxy-2'-fluorouridine-3'-phosphate
  modified_base 7: mod_base = OTHER; note = 2'-O-methylguanosine-3'-phosphate
  modified_base 8: mod_base = OTHER; note = 2'-deoxy-2'-fluoroguanosine-3'-phosphate
  modified_base 9: mod_base = OTHER; note = 2'-deoxy-2'-fluorocytidine-3'-phosphate
  modified_base 10: mod_base = OTHER; note = 2'-O-methylcytidine-3'-phosphate
  modified_base 11: mod_base = OTHER; note = 2'-O-methylcytidine-3'-phosphate
  modified_base 12: mod_base = OTHER; note = 2'-O-methyladenosine-3'-phosphate
  modified_base 13: mod_base = OTHER; note = 2'-O-methylguanosine-3'-phosphate
  modified_base 14: mod_base = OTHER; note = 2'-deoxy-2'-fluorouridine-3'-phosphate
  modified_base 15: mod_base = OTHER; note = 2'-O-methyluridine-3'-phosphate
  modified_base 16: mod_base = OTHER; note = 2'-deoxy-2'-fluorocytidine-3'-phosphate
  modified_base 17: mod_base = OTHER; note = 2'-O-methyladenosine-3'-phosphate
  modified_base 18: mod_base = OTHER; note = 2'-O-methylguanosine-3'-phosphate
  modified_base 19: mod_base = OTHER; note = 2'-O-methyluridine-3'-phosphate
  modified_base 20: mod_base = OTHER; note = 2'-O-methylcytidine-3'-phosphate
  modified_base 21: mod_base = OTHER; note = 2'-O-methyluridine-3'-phosphorothioate
  modified_base 22: mod_base = OTHER; note = 2'-O-methylguanosine-3'-phosphorothioate
  modified_base 23: mod_base = OTHER; note = 2'-O-methyladenosine
ataagtggcccagttcagtctga

SEQ ID NO: 1304 - RNA, 23 nt, synthetic construct
  source 1..23: mol_type = other RNA
  modified_base 1: mod_base = OTHER; note = 2'-O-methyladenosine-3'-phosphorothioate
  modified_base 2: mod_base = OTHER; note = 2'-deoxy-2'-fluorouridine-3'-phosphorothioate
  modified_base 3: mod_base = OTHER; note = 2'-O-methylguanosine-3'-phosphate
  modified_base 4: mod_base = OTHER; note = 2'-O-methyluridine-3'-phosphate
  modified_base 5: mod_base = OTHER; note = 2'-O-methylguanosine-3'-phosphate
  modified_base 6: mod_base = OTHER; note = 2'-deoxy-2'-fluorocytidine-3'-phosphate
  modified_base 7: mod_base = OTHER; note = 2'-O-methyluridine-3'-phosphate
  modified_base 8: mod_base = OTHER; note = 2'-deoxy-2'-fluorouridine-3'-phosphate
  modified_base 9: mod_base = OTHER; note = 2'-deoxy-2'-fluoroguanosine-3'-phosphate
  modified_base 10: mod_base = OTHER; note = 2'-O-methylcytidine-3'-phosphate
  modified_base 11: mod_base = OTHER; note = 2'-O-methyladenosine-3'-phosphate
  modified_base 12: mod_base = OTHER; note = 2'-O-methyladenosine-3'-phosphate
  modified_base 13: mod_base = OTHER; note = 2'-O-methylguanosine-3'-phosphate
  modified_base 14: mod_base = OTHER; note = 2'-deoxy-2'-fluoroguanosine-3'-phosphate
  modified_base 15: mod_base = OTHER; note = 2'-O-methyluridine-3'-phosphate
  modified_base 16: mod_base = OTHER; note = 2'-deoxy-2'-fluoroadenosine-3'-phosphate
  modified_base 17: mod_base = OTHER; note = 2'-O-methyladenosine-3'-phosphate
  modified_base 18: mod_base = OTHER; note = 2'-O-methylguanosine-3'-phosphate
  modified_base 19: mod_base = OTHER; note = 2'-O-methyluridine-3'-phosphate
  modified_base 20: mod_base = OTHER; note = 2'-O-methylguanosine-3'-phosphate
  modified_base 21: mod_base = OTHER; note = 2'-O-methylguanosine-3'-phosphorothioate
  modified_base 22: mod_base = OTHER; note = 2'-O-methylcytidine-3'-phosphorothioate
  modified_base 23: mod_base = OTHER; note = 2'-O-methylcytidine
atgtgcttgcaaggtaagtggcc

SEQ ID NO: 1305 - RNA, 23 nt, synthetic construct
  source 1..23: mol_type = other RNA
  modified_base 1: mod_base = OTHER; note = 2'-O-methyladenosine-3'-phosphorothioate
  modified_base 2: mod_base = OTHER; note = 2'-deoxy-2'-fluoroadenosine-3'-phosphorothioate
  modified_base 3: mod_base = OTHER; note = 2'-O-methyladenosine-3'-phosphate
  modified_base 4: mod_base = OTHER; note = 2'-O-methyluridine-3'-phosphate
  modified_base 5: mod_base = OTHER; note = 2'-O-methylguanosine-3'-phosphate
  modified_base 6: mod_base = OTHER; note = 2'-deoxy-2'-fluorouridine-3'-phosphate
  modified_base 7: mod_base = OTHER; note = 2'-O-methyluridine-3'-phosphate
  modified_base 8: mod_base = OTHER; note = 2'-deoxy-2'-fluorouridine-3'-phosphate
  modified_base 9: mod_base = OTHER; note = 2'-deoxy-2'-fluorouridine-3'-phosphate
  modified_base 10: mod_base = OTHER; note = 2'-O-methylcytidine-3'-phosphate
  modified_base 11: mod_base = OTHER; note = 2'-O-methyluridine-3'-phosphate
  modified_base 12: mod_base = OTHER; note = 2'-O-methylguanosine-3'-phosphate
  modified_base 13: mod_base = OTHER; note = 2'-O-methyluridine-3'-phosphate
  modified_base 14: mod_base = OTHER; note = 2'-deoxy-2'-fluoroguanosine-3'-phosphate
  modified_base 15: mod_base = OTHER; note = 2'-O-methylcytidine-3'-phosphate
  modified_base 16: mod_base = OTHER; note = 2'-deoxy-2'-fluorouridine-3'-phosphate
  modified_base 17: mod_base = OTHER; note = 2'-O-methyluridine-3'-phosphate
  modified_base 18: mod_base = OTHER; note = 2'-O-methylguanosine-3'-phosphate
  modified_base 19: mod_base = OTHER; note = 2'-O-methylcytidine-3'-phosphate
  modified_base 20: mod_base = OTHER; note = 2'-O-methyladenosine-3'-phosphate
  modified_base 21: mod_base = OTHER; note = 2'-O-methyladenosine-3'-phosphorothioate
  modified_base 22: mod_base = OTHER; note = 2'-O-methylguanosine-3'-phosphorothioate
  modified_base 23: mod_base = OTHER; note = 2'-O-methylguanosine
aaatgttttctgtgcttgcaagg

SEQ ID NO: 1306 - RNA, 23 nt, synthetic construct
  source 1..23: mol_type = other RNA
  modified_base 1: mod_base = OTHER; note = 2'-O-methyladenosine-3'-phosphorothioate
  modified_base 2: mod_base = OTHER; note = 2'-deoxy-2'-fluorocytidine-3'-phosphorothioate
  modified_base 3: mod_base = OTHER; note = 2'-O-methyluridine-3'-phosphate
  modified_base 4: mod_base = OTHER; note = 2'-O-methyladenosine-3'-phosphate
  modified_base 5: mod_base = OTHER; note = 2'-O-methylcytidine-3'-phosphate
  modified_base 6: mod_base = OTHER; note = 2'-deoxy-2'-fluorouridine-3'-phosphate
  modified_base 7: mod_base = OTHER; note = 2'-O-methyladenosine-3'-phosphate
  modified_base 8: mod_base = OTHER; note = 2'-deoxy-2'-fluorouridine-3'-phosphate
  modified_base 9: mod_base = OTHER; note = 2'-deoxy-2'-fluoroadenosine-3'-phosphate
  modified_base 10: mod_base = OTHER; note = 2'-O-methyladenosine-3'-phosphate
  modified_base 11: mod_base = OTHER; note = 2'-O-methyluridine-3'-phosphate
  modified_base 12: mod_base = OTHER; note = 2'-O-methylguanosine-3'-phosphate
  modified_base 13: mod_base = OTHER; note = 2'-O-methyluridine-3'-phosphate
  modified_base 14: mod_base = OTHER; note = 2'-deoxy-2'-fluorouridine-3'-phosphate
  modified_base 15: mod_base = OTHER; note = 2'-O-methyluridine-3'-phosphate
  modified_base 16: mod_base = OTHER; note = 2'-deoxy-2'-fluorouridine-3'-phosphate
  modified_base 17: mod_base = OTHER; note = 2'-O-methylcytidine-3'-phosphate
  modified_base 18: mod_base = OTHER; note = 2'-O-methyluridine-3'-phosphate
  modified_base 19: mod_base = OTHER; note = 2'-O-methylguanosine-3'-phosphate
  modified_base 20: mod_base = OTHER; note = 2'-O-methyluridine-3'-phosphate
  modified_base 21: mod_base = OTHER; note = 2'-O-methylguanosine-3'-phosphorothioate
  modified_base 22: mod_base = OTHER; note = 2'-O-methylcytidine-3'-phosphorothioate
  modified_base 23: mod_base = OTHER; note = 2'-O-methyluridine
actactataatgttttctgtgct

SEQ ID NO: 1307 - RNA, 23 nt, synthetic construct
  source 1..23: mol_type = other RNA
  modified_base 1: mod_base = OTHER; note = 2'-O-methyladenosine-3'-phosphorothioate
  modified_base 2: mod_base = OTHER; note = 2'-deoxy-2'-fluoroadenosine-3'-phosphorothioate
  modified_base 3: mod_base = OTHER; note = 2'-O-methyladenosine-3'-phosphate
  modified_base 4: mod_base = OTHER; note = 2'-O-methyladenosine-3'-phosphate
  modified_base 5: mod_base = OTHER; note = 2'-O-methylguanosine-3'-phosphate
  modified_base 6: mod_base = OTHER; note = 2'-deoxy-2'-fluorocytidine-3'-phosphate
  modified_base 7: mod_base = OTHER; note = 2'-O-methyluridine-3'-phosphate
  modified_base 8: mod_base = OTHER; note = 2'-deoxy-2'-fluoroadenosine-3'-phosphate
  modified_base 9: mod_base = OTHER; note = 2'-deoxy-2'-fluoroguanosine-3'-phosphate
  modified_base 10: mod_base = OTHER; note = 2'-O-methylcytidine-3'-phosphate
  modified_base 11: mod_base = OTHER; note = 2'-O-methyluridine-3'-phosphate
  modified_base 12: mod_base = OTHER; note = 2'-O-methyladenosine-3'-phosphate
  modified_base 13: mod_base = OTHER; note = 2'-O-methylcytidine-3'-phosphate
  modified_base 14: mod_base = OTHER; note = 2'-deoxy-2'-fluorouridine-3'-phosphate
  modified_base 15: mod_base = OTHER; note = 2'-O-methyladenosine-3'-phosphate
  modified_base 16: mod_base = OTHER; note = 2'-deoxy-2'-fluorouridine-3'-phosphate
  modified_base 17: mod_base = OTHER; note = 2'-O-methyladenosine-3'-phosphate
  modified_base 18: mod_base = OTHER; note = 2'-O-methyladenosine-3'-phosphate
  modified_base 19: mod_base = OTHER; note = 2'-O-methyluridine-3'-phosphate
  modified_base 20: mod_base = OTHER; note = 2'-O-methylguanosine-3'-phosphate
  modified_base 21: mod_base = OTHER; note = 2'-O-methyluridine-3'-phosphorothioate
  modified_base 22: mod_base = OTHER; note = 2'-O-methyluridine-3'-phosphorothioate
  modified_base 23: mod_base = OTHER; note = 2'-O-methyluridine
aaaagctagctactataatgttt

SEQ ID NO: 1308 - RNA, 23 nt, synthetic construct
  source 1..23: mol_type = other RNA
  modified_base 1: mod_base = OTHER; note = 2'-O-methyladenosine-3'-phosphorothioate
  modified_base 2: mod_base = OTHER; note = 2'-deoxy-2'-fluorocytidine-3'-phosphorothioate
  modified_base 3: mod_base = OTHER; note = 2'-O-methyluridine-3'-phosphate
  modified_base 4: mod_base = OTHER; note = 2'-O-methylguanosine-3'-phosphate
  modified_base 5: mod_base = OTHER; note = 2'-O-methylcytidine-3'-phosphate
  modified_base 6: mod_base = OTHER; note = 2'-deoxy-2'-fluorocytidine-3'-phosphate
  modified_base 7: mod_base = OTHER; note = 2'-O-methyladenosine-3'-phosphate
  modified_base 8: mod_base = OTHER; note = 2'-deoxy-2'-fluorouridine-3'-phosphate
  modified_base 9: mod_base = OTHER; note = 2'-deoxy-2'-fluorocytidine-3'-phosphate
  modified_base 10: mod_base = OTHER; note = 2'-O-methyladenosine-3'-phosphate
  modified_base 11: mod_base = OTHER; note = 2'-O-methyladenosine-3'-phosphate
  modified_base 12: mod_base = OTHER; note = 2'-O-methyladenosine-3'-phosphate
  modified_base 13: mod_base = OTHER; note = 2'-O-methylguanosine-3'-phosphate
  modified_base 14: mod_base = OTHER; note = 2'-deoxy-2'-fluorocytidine-3'-phosphate
  modified_base 15: mod_base = OTHER; note = 2'-O-methyluridine-3'-phosphate
  modified_base 16: mod_base = OTHER; note = 2'-deoxy-2'-fluoroadenosine-3'-phosphate
  modified_base 17: mod_base = OTHER; note = 2'-O-methylguanosine-3'-phosphate
  modified_base 18: mod_base = OTHER; note = 2'-O-methylcytidine-3'-phosphate
  modified_base 19: mod_base = OTHER; note = 2'-O-methyluridine-3'-phosphate
  modified_base 20: mod_base = OTHER; note = 2'-O-methyladenosine-3'-phosphate
  modified_base 21: mod_base = OTHER; note = 2'-O-methylcytidine-3'-phosphorothioate
  modified_base 22: mod_base = OTHER; note = 2'-O-methyluridine-3'-phosphorothioate
  modified_base 23: mod_base = OTHER; note = 2'-O-methyladenosine
actgccatcaaagctagctacta

SEQ ID NO: 1309 - RNA, 23 nt, synthetic construct
  source 1..23: mol_type = other RNA
  modified_base 1: mod_base = OTHER; note = 2'-O-methyladenosine-3'-phosphorothioate
  modified_base 2: mod_base = OTHER; note = 2'-deoxy-2'-fluoroadenosine-3'-phosphorothioate
  modified_base 3: mod_base = OTHER; note = 2'-O-methylcytidine-3'-phosphate
  modified_base 4: mod_base = OTHER; note = 2'-O-methyluridine-3'-phosphate
  modified_base 5: mod_base = OTHER; note = 2'-O-methyluridine-3'-phosphate
  modified_base 6: mod_base = OTHER; note = 2'-deoxy-2'-fluorocytidine-3'-phosphate
  modified_base 7: mod_base = OTHER; note = 2'-O-methylcytidine-3'-phosphate
  modified_base 8: mod_base = OTHER; note = 2'-deoxy-2'-fluorouridine-3'-phosphate
  modified_base 9: mod_base = OTHER; note = 2'-deoxy-2'-fluorocytidine-3'-phosphate
  modified_base 10: mod_base = OTHER; note = 2'-O-methyluridine-3'-phosphate
  modified_base 11: mod_base = OTHER; note = 2'-O-methylguanosine-3'-phosphate
  modified_base 12: mod_base = OTHER; note = 2'-O-methylcytidine-3'-phosphate
  modified_base 13: mod_base = OTHER; note = 2'-O-methylcytidine-3'-phosphate
  modified_base 14: mod_base = OTHER; note = 2'-deoxy-2'-fluoroadenosine-3'-phosphate
  modified_base 15: mod_base = OTHER; note = 2'-O-methyluridine-3'-phosphate
  modified_base 16: mod_base = OTHER; note = 2'-deoxy-2'-fluorocytidine-3'-phosphate
  modified_base 17: mod_base = OTHER; note = 2'-O-methyladenosine-3'-phosphate
  modified_base 18: mod_base = OTHER; note = 2'-O-methyladenosine-3'-phosphate
  modified_base 19: mod_base = OTHER; note = 2'-O-methyladenosine-3'-phosphate
  modified_base 20: mod_base = OTHER; note = 2'-O-methylguanosine-3'-phosphate
  modified_base 21: mod_base = OTHER; note = 2'-O-methylcytidine-3'-phosphorothioate
  modified_base 22: mod_base = OTHER; note = 2'-O-methyluridine-3'-phosphorothioate
  modified_base 23: mod_base = OTHER; note = 2'-O-methyladenosine
aacttcctctgccatcaaagcta

SEQ ID NO: 1310 - RNA, 23 nt, synthetic construct
  source 1..23: mol_type = other RNA
  modified_base 1: mod_base = OTHER; note = 2'-O-methyladenosine-3'-phosphorothioate
  modified_base 2: mod_base = OTHER; note = 2'-deoxy-2'-fluorouridine-3'-phosphorothioate
  modified_base 3: mod_base = OTHER; note = 2'-O-methyluridine-3'-phosphate
  modified_base 4: mod_base = OTHER; note = 2'-O-methylguanosine-3'-phosphate
  modified_base 5: mod_base = OTHER; note = 2'-O-methylguanosine-3'-phosphate
  modified_base 6: mod_base = OTHER; note = 2'-deoxy-2'-fluorouridine-3'-phosphate
  modified_base 7: mod_base = OTHER; note = 2'-O-methyladenosine-3'-phosphate
  modified_base 8: mod_base = OTHER; note = 2'-deoxy-2'-fluoroadenosine-3'-phosphate
  modified_base 9: mod_base = OTHER; note = 2'-deoxy-2'-fluorocytidine-3'-phosphate
  modified_base 10: mod_base = OTHER; note = 2'-O-methylcytidine-3'-phosphate
  modified_base 11: mod_base = OTHER; note = 2'-O-methyladenosine-3'-phosphate
  modified_base 12: mod_base = OTHER; note = 2'-O-methylcytidine-3'-phosphate
  modified_base 13: mod_base = OTHER; note = 2'-O-methyluridine-3'-phosphate
  modified_base 14: mod_base = OTHER; note = 2'-deoxy-2'-fluorouridine-3'-phosphate
  modified_base 15: mod_base = OTHER; note = 2'-O-methylcytidine-3'-phosphate
  modified_base 16: mod_base = OTHER; note = 2'-deoxy-2'-fluorocytidine-3'-phosphate
  modified_base 17: mod_base = OTHER; note = 2'-O-methyluridine-3'-phosphate
  modified_base 18: mod_base = OTHER; note = 2'-O-methylcytidine-3'-phosphate
  modified_base 19: mod_base = OTHER; note = 2'-O-methyluridine-3'-phosphate
  modified_base 20: mod_base = OTHER; note = 2'-O-methylguanosine-3'-phosphate
  modified_base 21: mod_base = OTHER; note = 2'-O-methylcytidine-3'-phosphorothioate
  modified_base 22: mod_base = OTHER; note = 2'-O-methylcytidine-3'-phosphorothioate
  modified_base 23: mod_base = OTHER; note = 2'-O-methyladenosine
attggtaaccacttcctctgcca

SEQ ID NO: 1311 - RNA, 23 nt, synthetic construct
  source 1..23: mol_type = other RNA
  modified_base 1: mod_base = OTHER; note = 2'-O-methyladenosine-3'-phosphorothioate
  modified_base 2: mod_base = OTHER; note = 2'-deoxy-2'-fluoroadenosine-3'-phosphorothioate
  modified_base 3: mod_base = OTHER; note = 2'-O-methyluridine-3'-phosphate
  modified_base 4: mod_base = OTHER; note = 2'-O-methylcytidine-3'-phosphate
  modified_base 5: mod_base = OTHER; note = 2'-O-methyluridine-3'-phosphate
  modified_base 6: mod_base = OTHER; note = 2'-deoxy-2'-fluorouridine-3'-phosphate
  modified_base 7: mod_base = OTHER; note = 2'-O-methyladenosine-3'-phosphate
  modified_base 8: mod_base = OTHER; note = 2'-deoxy-2'-fluorouridine-3'-phosphate
  modified_base 9: mod_base = OTHER; note = 2'-deoxy-2'-fluorocytidine-3'-phosphate
  modified_base 10: mod_base = OTHER; note = 2'-O-methyluridine-3'-phosphate
  modified_base 11: mod_base = OTHER; note = 2'-O-methylcytidine-3'-phosphate
  modified_base 12: mod_base = OTHER; note = 2'-O-methylcytidine-3'-phosphate
  modified_base 13: mod_base = OTHER; note = 2'-O-methyluridine-3'-phosphate
  modified_base 14: mod_base = OTHER; note = 2'-deoxy-2'-fluorouridine-3'-phosphate
  modified_base 15: mod_base = OTHER; note = 2'-O-methylguanosine-3'-phosphate
  modified_base 16: mod_base = OTHER; note = 2'-deoxy-2'-fluoroguanosine-3'-phosphate
  modified_base 17: mod_base = OTHER; note = 2'-O-methyluridine-3'-phosphate
  modified_base 18: mod_base = OTHER; note = 2'-O-methyladenosine-3'-phosphate
  modified_base 19: mod_base = OTHER; note = 2'-O-methyladenosine-3'-phosphate
  modified_base 20: mod_base = OTHER; note = 2'-O-methylcytidine-3'-phosphate
  modified_base 21: mod_base = OTHER; note = 2'-O-methylcytidine-3'-phosphorothioate
  modified_base 22: mod_base = OTHER; note = 2'-O-methyladenosine-3'-phosphorothioate
  modified_base 23: mod_base = OTHER; note = 2'-O-methylcytidine
aatcttatctccttggtaaccac

SEQ ID NO: 1312 - RNA, 23 nt, synthetic construct
  source 1..23: mol_type = other RNA
  modified_base 1: mod_base = OTHER; note = 2'-O-methyladenosine-3'-phosphorothioate
  modified_base 2: mod_base = OTHER; note = 2'-deoxy-2'-fluoroadenosine-3'-phosphorothioate
  modified_base 3: mod_base = OTHER; note = 2'-O-methyluridine-3'-phosphate
  modified_base 4: mod_base = OTHER; note = 2'-O-methylguanosine-3'-phosphate
  modified_base 5: mod_base = OTHER; note = 2'-O-methylcytidine-3'-phosphate
  modified_base 6: mod_base = OTHER; note = 2'-deoxy-2'-fluoroadenosine-3'-phosphate
  modified_base 7: mod_base = OTHER; note = 2'-O-methyluridine-3'-phosphate
  modified_base 8: mod_base = OTHER; note = 2'-deoxy-2'-fluoroguanosine-3'-phosphate
  modified_base 9: mod_base = OTHER; note = 2'-deoxy-2'-fluoroadenosine-3'-phosphate
  modified_base 10: mod_base = OTHER; note = 2'-O-methyluridine-3'-phosphate
  modified_base 11: mod_base = OTHER; note = 2'-O-methylcytidine-3'-phosphate
  modified_base 12: mod_base = OTHER; note = 2'-O-methyluridine-3'-phosphate
  modified_base 13: mod_base = OTHER; note = 2'-O-methyluridine-3'-phosphate
  modified_base 14: mod_base = OTHER; note = 2'-deoxy-2'-fluoroadenosine-3'-phosphate
  modified_base 15: mod_base = OTHER; note = 2'-O-methyluridine-3'-phosphate
  modified_base 16: mod_base = OTHER; note = 2'-deoxy-2'-fluorocytidine-3'-phosphate
  modified_base 17: mod_base = OTHER; note = 2'-O-methyluridine-3'-phosphate
  modified_base 18: mod_base = OTHER; note = 2'-O-methylcytidine-3'-phosphate
  modified_base 19: mod_base = OTHER; note = 2'-O-methylcytidine-3'-phosphate
  modified_base 20: mod_base = OTHER; note = 2'-O-methyluridine-3'-phosphate
  modified_base 21: mod_base = OTHER; note = 2'-O-methyluridine-3'-phosphorothioate
  modified_base 22: mod_base = OTHER; note = 2'-O-methylguanosine-3'-phosphorothioate
  modified_base 23: mod_base = OTHER; note = 2'-O-methylguanosine
aatgcatgatcttatctccttgg

SEQ ID NO: 1313 - RNA, 23 nt, synthetic construct
  source 1..23: mol_type = other RNA
  modified_base 1: mod_base = OTHER; note = 2'-O-methyladenosine-3'-phosphorothioate
  modified_base 2: mod_base = OTHER; note = 2'-deoxy-2'-fluorouridine-3'-phosphorothioate
  modified_base 3: mod_base = OTHER; note = 2'-O-methyluridine-3'-phosphate
  modified_base 4: mod_base = OTHER; note = 2'-O-methylguanosine-3'-phosphate
  modified_base 5: mod_base = OTHER; note = 2'-O-methyladenosine-3'-phosphate
  modified_base 6: mod_base = OTHER; note = 2'-deoxy-2'-fluorouridine-3'-phosphate
  modified_base 7: mod_base = OTHER; note = 2'-O-methyluridine-3'-phosphate
  modified_base 8: mod_base = OTHER; note = 2'-deoxy-2'-fluoroguanosine-3'-phosphate
  modified_base 9: mod_base = OTHER; note = 2'-deoxy-2'-fluorocytidine-3'-phosphate
  modified_base 10: mod_base = OTHER; note = 2'-O-methyladenosine-3'-phosphate
  modified_base 11: mod_base = OTHER; note = 2'-O-methyluridine-3'-phosphate
  modified_base 12: mod_base = OTHER; note = 2'-O-methylguanosine-3'-phosphate
  modified_base 13: mod_base = OTHER; note = 2'-O-methylcytidine-3'-phosphate
  modified_base 14: mod_base = OTHER; note = 2'-deoxy-2'-fluoroadenosine-3'-phosphate
  modified_base 15: mod_base = OTHER; note = 2'-O-methyluridine-3'-phosphate
  modified_base 16: mod_base = OTHER; note = 2'-deoxy-2'-fluoroguanosine-3'-phosphate
  modified_base 17: mod_base = OTHER; note = 2'-O-methyladenosine-3'-phosphate
  modified_base 18: mod_base = OTHER; note = 2'-O-methyluridine-3'-phosphate
  modified_base 19: mod_base = OTHER; note = 2'-O-methylcytidine-3'-phosphate
  modified_base 20: mod_base = OTHER; note = 2'-O-methyluridine-3'-phosphate
  modified_base 21: mod_base = OTHER; note = 2'-O-methyluridine-3'-phosphorothioate
  modified_base 22: mod_base = OTHER; note = 2'-O-methyladenosine-3'-phosphorothioate
  modified_base 23: mod_base = OTHER; note = 2'-O-methyluridine
attgattgcatgcatgatcttat

SEQ ID NO: 1314 - RNA, 23 nt, synthetic construct
  source 1..23: mol_type = other RNA
  modified_base 1: mod_base = OTHER; note = 2'-O-methyladenosine-3'-phosphorothioate
  modified_base 2: mod_base = OTHER; note = 2'-deoxy-2'-fluoroadenosine-3'-phosphorothioate
  modified_base 3: mod_base = OTHER; note = 2'-O-methylguanosine-3'-phosphate
  modified_base 4: mod_base = OTHER; note = 2'-O-methyluridine-3'-phosphate
  modified_base 5: mod_base = OTHER; note = 2'-O-methylcytidine-3'-phosphate
  modified_base 6: mod_base = OTHER; note = 2'-deoxy-2'-fluorouridine-3'-phosphate
  modified_base 7: mod_base = OTHER; note = 2'-O-methyluridine-3'-phosphate
  modified_base 8: mod_base = OTHER; note = 2'-deoxy-2'-fluorocytidine-3'-phosphate
  modified_base 9: mod_base = OTHER; note = 2'-deoxy-2'-fluorouridine-3'-phosphate
  modified_base 10: mod_base = OTHER; note = 2'-O-methylguanosine-3'-phosphate
  modified_base 11: mod_base = OTHER; note = 2'-O-methyluridine-3'-phosphate
  modified_base 12: mod_base = OTHER; note = 2'-O-methyluridine-3'-phosphate
  modified_base 13: mod_base = OTHER; note = 2'-O-methylguanosine-3'-phosphate
  modified_base 14: mod_base = OTHER; note = 2'-deoxy-2'-fluoroadenosine-3'-phosphate
  modified_base 15: mod_base = OTHER; note = 2'-O-methyluridine-3'-phosphate
  modified_base 16: mod_base = OTHER; note = 2'-deoxy-2'-fluorouridine-3'-phosphate
  modified_base 17: mod_base = OTHER; note = 2'-O-methylguanosine-3'-phosphate
  modified_base 18: mod_base = OTHER; note = 2'-O-methylcytidine-3'-phosphate
  modified_base 19: mod_base = OTHER; note = 2'-O-methyladenosine-3'-phosphate
  modified_base 20: mod_base = OTHER; note = 2'-O-methyluridine-3'-phosphate
  modified_base 21: mod_base = OTHER; note = 2'-O-methylguanosine-3'-phosphorothioate
  modified_base 22: mod_base = OTHER; note = 2'-O-methylcytidine-3'-phosphorothioate
  modified_base 23: mod_base = OTHER; note = 2'-O-methyladenosine
aagtcttctgttgattgcatgca

SEQ ID NO: 1315 - RNA, 23 nt, synthetic construct
  source 1..23: mol_type = other RNA
  modified_base 1: mod_base = OTHER; note = 2'-O-methyladenosine-3'-phosphorothioate
  modified_base 2: mod_base = OTHER; note = 2'-deoxy-2'-fluoroadenosine-3'-phosphorothioate
  modified_base 3: mod_base = OTHER; note = 2'-O-methyladenosine-3'-phosphate
  modified_base 4: mod_base = OTHER; note = 2'-O-methyladenosine-3'-phosphate
  modified_base 5: mod_base = OTHER; note = 2'-O-methyluridine-3'-phosphate
  modified_base 6: mod_base = OTHER; note = 2'-deoxy-2'-fluoroguanosine-3'-phosphate
  modified_base 7: mod_base = OTHER; note = 2'-O-methyluridine-3'-phosphate
  modified_base 8: mod_base = OTHER; note = 2'-deoxy-2'-fluorouridine-3'-phosphate
  modified_base 9: mod_base = OTHER; note = 2'-deoxy-2'-fluorocytidine-3'-phosphate
  modified_base 10: mod_base = OTHER; note = 2'-O-methylcytidine-3'-phosphate
  modified_base 11: mod_base = OTHER; note = 2'-O-methylcytidine-3'-phosphate
  modified_base 12: mod_base = OTHER; note = 2'-O-methyladenosine-3'-phosphate
  modified_base 13: mod_base = OTHER; note = 2'-O-methylguanosine-3'-phosphate
  modified_base 14: mod_base = OTHER; note = 2'-deoxy-2'-fluorouridine-3'-phosphate
  modified_base 15: mod_base = OTHER; note = 2'-O-methylcytidine-3'-phosphate
  modified_base 16: mod_base = OTHER; note = 2'-deoxy-2'-fluorouridine-3'-phosphate
  modified_base 17: mod_base = OTHER; note = 2'-O-methyluridine-3'-phosphate
  modified_base 18: mod_base = OTHER; note = 2'-O-methylcytidine-3'-phosphate
  modified_base 19: mod_base = OTHER; note = 2'-O-methyluridine-3'-phosphate
  modified_base 20: mod_base = OTHER; note = 2'-O-methylguanosine-3'-phosphate
  modified_base 21: mod_base = OTHER; note = 2'-O-methyluridine-3'-phosphorothioate
  modified_base 22: mod_base = OTHER; note = 2'-O-methyluridine-3'-phosphorothioate
  modified_base 23: mod_base = OTHER; note = 2'-O-methylguanosine
aaaatgttcccagtcttctgttg

SEQ ID NO: 1316 - RNA, 23 nt, synthetic construct
  source 1..23: mol_type = other RNA
  modified_base 1: mod_base = OTHER; note = 2'-O-methyladenosine-3'-phosphorothioate
  modified_base 2: mod_base = OTHER; note = 2'-deoxy-2'-fluorocytidine-3'-phosphorothioate
  modified_base 3: mod_base = OTHER; note = 2'-O-methyladenosine-3'-phosphate
  modified_base 4: mod_base = OTHER; note = 2'-O-methyladenosine-3'-phosphate
  modified_base 5: mod_base = OTHER; note = 2'-O-methylcytidine-3'-phosphate
  modified_base 6: mod_base = OTHER; note = 2'-deoxy-2'-fluorouridine-3'-phosphate
  modified_base 7: mod_base = OTHER; note = 2'-O-methyluridine-3'-phosphate
  modified_base 8: mod_base = OTHER; note = 2'-deoxy-2'-fluorocytidine-3'-phosphate
  modified_base 9: mod_base = OTHER; note = 2'-deoxy-2'-fluoroadenosine-3'-phosphate
  modified_base 10: mod_base = OTHER; note = 2'-O-methyladenosine-3'-phosphate
  modified_base 11: mod_base = OTHER; note = 2'-O-methyladenosine-3'-phosphate
  modified_base 12: mod_base = OTHER; note = 2'-O-methyluridine-3'-phosphate
  modified_base 13: mod_base = OTHER; note = 2'-O-methylguanosine-3'-phosphate
  modified_base 14: mod_base = OTHER; note = 2'-deoxy-2'-fluorouridine-3'-phosphate
  modified_base 15: mod_base = OTHER; note = 2'-O-methyluridine-3'-phosphate
  modified_base 16: mod_base = OTHER; note = 2'-deoxy-2'-fluorocytidine-3'-phosphate
  modified_base 17: mod_base = OTHER; note = 2'-O-methylcytidine-3'-phosphate
  modified_base 18: mod_base = OTHER; note = 2'-O-methylcytidine-3'-phosphate
  modified_base 19: mod_base = OTHER; note = 2'-O-methyladenosine-3'-phosphate
  modified_base 20: mod_base = OTHER; note = 2'-O-methylguanosine-3'-phosphate
  modified_base 21: mod_base = OTHER; note = 2'-O-methyluridine-3'-phosphorothioate
  modified_base 22: mod_base = OTHER; note = 2'-O-methylcytidine-3'-phosphorothioate
  modified_base 23: mod_base = OTHER; note = 2'-O-methyluridine
acaacttcaaatgttcccagtct

SEQ ID NO: 1317 - RNA, 23 nt, synthetic construct
  source 1..23: mol_type = other RNA
  modified_base 1: mod_base = OTHER; note = 2'-O-methyladenosine-3'-phosphorothioate
  modified_base 2: mod_base = OTHER; note = 2'-deoxy-2'-fluoroguanosine-3'-phosphorothioate
  modified_base 3: mod_base = OTHER; note = 2'-O-methyladenosine-3'-phosphate
  modified_base 4: mod_base = OTHER; note = 2'-O-methyluridine-3'-phosphate
  modified_base 5: mod_base = OTHER; note = 2'-O-methylcytidine-3'-phosphate
  modified_base 6: mod_base = OTHER; note = 2'-deoxy-2'-fluorouridine-3'-phosphate
  modified_base 7: mod_base = OTHER; note = 2'-O-methyluridine-3'-phosphate
  modified_base 8: mod_base = OTHER; note = 2'-deoxy-2'-fluorocytidine-3'-phosphate
  modified_base 9: mod_base = OTHER; note = 2'-deoxy-2'-fluoroadenosine-3'-phosphate
  modified_base 10: mod_base = OTHER; note = 2'-O-methyladenosine-3'-phosphate
  modified_base 11: mod_base = OTHER; note = 2'-O-methylcytidine-3'-phosphate
  modified_base 12: mod_base = OTHER; note = 2'-O-methyluridine-3'-phosphate
  modified_base 13: mod_base = OTHER; note = 2'-O-methyluridine-3'-phosphate
  modified_base 14: mod_base = OTHER; note = 2'-deoxy-2'-fluorocytidine-3'-phosphate
  modified_base 15: mod_base = OTHER; note = 2'-O-methyladenosine-3'-phosphate
  modified_base 16: mod_base = OTHER; note = 2'-deoxy-2'-fluoroadenosine-3'-phosphate
  modified_base 17: mod_base = OTHER; note = 2'-O-methyladenosine-3'-phosphate
  modified_base 18: mod_base = OTHER; note = 2'-O-methyluridine-3'-phosphate
  modified_base 19: mod_base = OTHER; note = 2'-O-methylguanosine-3'-phosphate
  modified_base 20: mod_base = OTHER; note = 2'-O-methyluridine-3'-phosphate
  modified_base 21: mod_base = OTHER; note = 2'-O-methyluridine-3'-phosphorothioate
  modified_base 22: mod_base = OTHER; note = 2'-O-methylcytidine-3'-phosphorothioate
  modified_base 23: mod_base = OTHER; note = 2'-O-methylcytidine
agatcttcaacttcaaatgttcc

SEQ ID NO: 1318 - RNA, 23 nt, synthetic construct
  source 1..23: mol_type = other RNA
  modified_base 1: mod_base = OTHER; note = 2'-O-methyladenosine-3'-phosphorothioate
  modified_base 2: mod_base = OTHER; note = 2'-deoxy-2'-fluorocytidine-3'-phosphorothioate
  modified_base 3: mod_base = OTHER; note = 2'-O-methyladenosine-3'-phosphate
  modified_base 4: mod_base = OTHER; note = 2'-O-methyladenosine-3'-phosphate
  modified_base 5: mod_base = OTHER; note = 2'-O-methyluridine-3'-phosphate
  modified_base 6: mod_base = OTHER; note = 2'-deoxy-2'-fluorouridine-3'-phosphate
  modified_base 7: mod_base = OTHER; note = 2'-O-methyluridine-3'-phosphate
  modified_base 8: mod_base = OTHER; note = 2'-deoxy-2'-fluoroguanosine-3'-phosphate
  modified_base 9: mod_base = OTHER; note = 2'-deoxy-2'-fluoroadenosine-3'-phosphate
  modified_base 10: mod_base = OTHER; note = 2'-O-methyluridine-3'-phosphate
  modified_base 11: mod_base = OTHER; note = 2'-O-methylcytidine-3'-phosphate
  modified_base 12: mod_base = OTHER; note = 2'-O-methyluridine-3'-phosphate
  modified_base 13: mod_base = OTHER; note = 2'-O-methyluridine-3'-phosphate
  modified_base 14: mod_base = OTHER; note = 2'-deoxy-2'-fluorocytidine-3'-phosphate
  modified_base 15: mod_base = OTHER; note = 2'-O-methyladenosine-3'-phosphate
  modified_base 16: mod_base = OTHER; note = 2'-deoxy-2'-fluoroadenosine-3'-phosphate
  modified_base 17: mod_base = OTHER; note = 2'-O-methylcytidine-3'-phosphate
  modified_base 18: mod_base = OTHER; note = 2'-O-methyluridine-3'-phosphate
  modified_base 19: mod_base = OTHER; note = 2'-O-methyluridine-3'-phosphate
  modified_base 20: mod_base = OTHER; note = 2'-O-methylcytidine-3'-phosphate
  modified_base 21: mod_base = OTHER; note = 2'-O-methyladenosine-3'-phosphorothioate
  modified_base 22: mod_base = OTHER; note = 2'-O-methyladenosine-3'-phosphorothioate
  modified_base 23: mod_base = OTHER; note = 2'-O-methyladenosine
acaatttgatcttcaacttcaaa

SEQ ID NO: 1319 - RNA, 23 nt, synthetic construct
  source 1..23: mol_type = other RNA
  modified_base 1: mod_base = OTHER; note = 2'-O-methyladenosine-3'-phosphorothioate
  modified_base 2: mod_base = OTHER; note = 2'-deoxy-2'-fluorocytidine-3'-phosphorothioate
  modified_base 3: mod_base = OTHER; note = 2'-O-methyluridine-3'-phosphate
  modified_base 4: mod_base = OTHER; note = 2'-O-methylguanosine-3'-phosphate
  modified_base 5: mod_base = OTHER; note = 2'-O-methylcytidine-3'-phosphate
  modified_base 6: mod_base = OTHER; note = 2'-deoxy-2'-fluorouridine-3'-phosphate
  modified_base 7: mod_base = OTHER; note = 2'-O-methyluridine-3'-phosphate
  modified_base 8: mod_base = OTHER; note = 2'-deoxy-2'-fluorocytidine-3'-phosphate
  modified_base 9: mod_base = OTHER; note = 2'-deoxy-2'-fluoroadenosine-3'-phosphate
  modified_base 10: mod_base = OTHER; note = 2'-O-methyladenosine-3'-phosphate
  modified_base 11: mod_base = OTHER; note = 2'-O-methyluridine-3'-phosphate
  modified_base 12: mod_base = OTHER; note = 2'-O-methyluridine-3'-phosphate
  modified_base 13: mod_base = OTHER; note = 2'-O-methyluridine-3'-phosphate
  modified_base 14: mod_base = OTHER; note = 2'-deoxy-2'-fluoroguanosine-3'-phosphate
  modified_base 15: mod_base = OTHER; note = 2'-O-methyladenosine-3'-phosphate
  modified_base 16: mod_base = OTHER; note = 2'-deoxy-2'-fluorouridine-3'-phosphate
  modified_base 17: mod_base = OTHER; note = 2'-O-methylcytidine-3'-phosphate
  modified_base 18: mod_base = OTHER; note = 2'-O-methyluridine-3'-phosphate
  modified_base 19: mod_base = OTHER; note = 2'-O-methyluridine-3'-phosphate
  modified_base 20: mod_base = OTHER; note = 2'-O-methylcytidine-3'-phosphate
  modified_base 21: mod_base = OTHER; note = 2'-O-methyladenosine-3'-phosphorothioate
  modified_base 22: mod_base = OTHER; note = 2'-O-methyladenosine-3'-phosphorothioate
  modified_base 23: mod_base = OTHER; note = 2'-O-methylcytidine
actgcttcaatttgatcttcaac

SEQ ID NO: 1320 - RNA, 23 nt, synthetic construct
  source 1..23: mol_type = other RNA
  modified_base 1: mod_base = OTHER; note = 2'-O-methyladenosine-3'-phosphorothioate
  modified_base 2: mod_base = OTHER; note = 2'-deoxy-2'-fluorouridine-3'-phosphorothioate
  modified_base 3: mod_base = OTHER; note = 2'-O-methyluridine-3'-phosphate
  modified_base 4: mod_base = OTHER; note = 2'-O-methylguanosine-3'-phosphate
  modified_base 5: mod_base = OTHER; note = 2'-O-methyluridine-3'-phosphate
  modified_base 6: mod_base = OTHER; note = 2'-deoxy-2'-fluorocytidine-3'-phosphate
  modified_base 7: mod_base = OTHER; note = 2'-O-methyluridine-3'-phosphate
  modified_base 8: mod_base = OTHER; note = 2'-deoxy-2'-fluoroguanosine-3'-phosphate
  modified_base 9: mod_base = OTHER; note = 2'-deoxy-2'-fluoroguanosine-3'-phosphate
  modified_base 10: mod_base = OTHER; note = 2'-O-methylcytidine-3'-phosphate
  modified_base 11: mod_base = OTHER; note = 2'-O-methyluridine-3'-phosphate
  modified_base 12: mod_base = OTHER; note = 2'-O-methylguanosine-3'-phosphate
  modified_base 13: mod_base = OTHER; note = 2'-O-methylcytidine-3'-phosphate
  modified_base 14: mod_base = OTHER; note = 2'-deoxy-2'-fluorouridine-3'-phosphate
  modified_base 15: mod_base = OTHER; note = 2'-O-methyluridine-3'-phosphate
  modified_base 16: mod_base = OTHER; note = 2'-deoxy-2'-fluorocytidine-3'-phosphate
  modified_base 17: mod_base = OTHER; note = 2'-O-methyladenosine-3'-phosphate
  modified_base 18: mod_base = OTHER; note = 2'-O-methyladenosine-3'-phosphate
  modified_base 19: mod_base = OTHER; note = 2'-O-methyluridine-3'-phosphate
  modified_base 20: mod_base = OTHER; note = 2'-O-methyluridine-3'-phosphate
  modified_base 21: mod_base = OTHER; note = 2'-O-methyluridine-3'-phosphorothioate
  modified_base 22: mod_base = OTHER; note = 2'-O-methylguanosine-3'-phosphorothioate
  modified_base 23: mod_base = OTHER; note = 2'-O-methyladenosine
attgtctggctgcttcaatttga

SEQ ID NO: 1321 - RNA, 23 nt, synthetic construct
  source 1..23: mol_type = other RNA
  modified_base 1: mod_base = OTHER; note = 2'-O-methyladenosine-3'-phosphorothioate
  modified_base 2: mod_base = OTHER; note = 2'-deoxy-2'-fluorouridine-3'-phosphorothioate
  modified_base 3: mod_base = OTHER; note = 2'-O-methyluridine-3'-phosphate
  modified_base 4: mod_base = OTHER; note = 2'-O-methyluridine-3'-phosphate
  modified_base 5: mod_base = OTHER; note = 2'-O-methylguanosine-3'-phosphate
  modified_base 6: mod_base = OTHER; note = 2'-deoxy-2'-fluoroadenosine-3'-phosphate
  modified_base 7: mod_base = OTHER; note = 2'-O-methyladenosine-3'-phosphate
  modified_base 8: mod_base = OTHER; note = 2'-deoxy-2'-fluoroadenosine-3'-phosphate
  modified_base 9: mod_base = OTHER; note = 2'-deoxy-2'-fluoroadenosine-3'-phosphate
  modified_base 10: mod_base = OTHER; note = 2'-O-methyluridine-3'-phosphate
  modified_base 11: mod_base = OTHER; note = 2'-O-methyluridine-3'-phosphate
  modified_base 12: mod_base = OTHER; note = 2'-O-methylguanosine-3'-phosphate
  modified_base 13: mod_base = OTHER; note = 2'-O-methyluridine-3'-phosphate
  modified_base 14: mod_base = OTHER; note = 2'-deoxy-2'-fluorocytidine-3'-phosphate
  modified_base 15: mod_base = OTHER; note = 2'-O-methyluridine-3'-phosphate
  modified_base 16: mod_base = OTHER; note = 2'-deoxy-2'-fluoroguanosine-3'-phosphate
  modified_base 17: mod_base = OTHER; note = 2'-O-methylguanosine-3'-phosphate
  modified_base 18: mod_base = OTHER; note = 2'-O-methylcytidine-3'-phosphate
  modified_base 19: mod_base = OTHER; note = 2'-O-methyluridine-3'-phosphate
  modified_base 20: mod_base = OTHER; note = 2'-O-methylguanosine-3'-phosphate
  modified_base 21: mod_base = OTHER; note = 2'-O-methylcytidine-3'-phosphorothioate
  modified_base 22: mod_base = OTHER; note = 2'-O-methyluridine-3'-phosphorothioate
  modified_base 23: mod_base = OTHER; note = 2'-O-methyluridine
atttgaaaattgtctggctgctt

SEQ ID NO: 1322 - RNA, 23 nt, synthetic construct
  source 1..23: mol_type = other RNA
  modified_base 1: mod_base = OTHER; note = 2'-O-methyladenosine-3'-phosphorothioate
  modified_base 2: mod_base = OTHER; note = 2'-deoxy-2'-fluoroguanosine-3'-phosphorothioate
  modified_base 3: mod_base = OTHER; note = 2'-O-methyluridine-3'-phosphate
  modified_base 4: mod_base = OTHER; note = 2'-O-methyluridine-3'-phosphate
  modified_base 5: mod_base = OTHER; note = 2'-O-methyluridine-3'-phosphate
  modified_base 6: mod_base = OTHER; note = 2'-deoxy-2'-fluoroguanosine-3'-phosphate
  modified_base 7: mod_base = OTHER; note = 2'-O-methyluridine-3'-phosphate
  modified_base 8: mod_base = OTHER; note = 2'-deoxy-2'-fluorouridine-3'-phosphate
  modified_base 9: mod_base = OTHER; note = 2'-deoxy-2'-fluoroguanosine-3'-phosphate
  modified_base 10: mod_base = OTHER; note = 2'-O-methyluridine-3'-phosphate
  modified_base 11: mod_base = OTHER; note = 2'-O-methylcytidine-3'-phosphate
  modified_base 12: mod_base = OTHER; note = 2'-O-methylcytidine-3'-phosphate
  modified_base 13: mod_base = OTHER; note = 2'-O-methyladenosine-3'-phosphate
  modified_base 14: mod_base = OTHER; note = 2'-deoxy-2'-fluorocytidine-3'-phosphate
  modified_base 15: mod_base = OTHER; note = 2'-O-methyladenosine-3'-phosphate
  modified_base 16: mod_base = OTHER; note = 2'-deoxy-2'-fluoroadenosine-3'-phosphate
  modified_base 17: mod_base = OTHER; note = 2'-O-methyladenosine-3'-phosphate
  modified_base 18: mod_base = OTHER; note = 2'-O-methyluridine-3'-phosphate
  modified_base 19: mod_base = OTHER; note = 2'-O-methylcytidine-3'-phosphate
  modified_base 20: mod_base = OTHER; note = 2'-O-methylcytidine-3'-phosphate
  modified_base 21: mod_base = OTHER; note = 2'-O-methylcytidine-3'-phosphorothioate
  modified_base 22: mod_base = OTHER; note = 2'-O-methyladenosine-3'-phosphorothioate
  modified_base 23: mod_base = OTHER; note = 2'-O-methyluridine
agtttgttgtccacaaatcccat

SEQ ID NO: 1323 - RNA, 23 nt, synthetic construct
  source 1..23: mol_type = other RNA
  modified_base 1: mod_base = OTHER; note = 2'-O-methyladenosine-3'-phosphorothioate
  modified_base 2: mod_base = OTHER; note = 2'-deoxy-2'-fluorocytidine-3'-phosphorothioate
  modified_base 3: mod_base = OTHER; note = 2'-O-methyladenosine-3'-phosphate
  modified_base 4: mod_base = OTHER; note = 2'-O-methyladenosine-3'-phosphate
  modified_base 5: mod_base = OTHER; note = 2'-O-methyluridine-3'-phosphate
  modified_base 6: mod_base = OTHER; note = 2'-deoxy-2'-fluorouridine-3'-phosphate
  modified_base 7: mod_base = OTHER; note = 2'-O-methylcytidine-3'-phosphate
  modified_base 8: mod_base = OTHER; note = 2'-deoxy-2'-fluoroguanosine-3'-phosphate
  modified_base 9: mod_base = OTHER; note = 2'-deoxy-2'-fluorouridine-3'-phosphate
  modified_base 10: mod_base = OTHER; note = 2'-O-methyluridine-3'-phosphate
  modified_base 11: mod_base = OTHER; note = 2'-O-methyluridine-3'-phosphate
  modified_base 12: mod_base = OTHER; note = 2'-O-methylguanosine-3'-phosphate
  modified_base 13: mod_base = OTHER; note = 2'-O-methyluridine-3'-phosphate
  modified_base 14: mod_base = OTHER; note = 2'-deoxy-2'-fluorouridine-3'-phosphate
  modified_base 15: mod_base = OTHER; note = 2'-O-methylguanosine-3'-phosphate
  modified_base 16: mod_base = OTHER; note = 2'-deoxy-2'-fluorouridine-3'-phosphate
  modified_base 17: mod_base = OTHER; note = 2'-O-methylcytidine-3'-phosphate
  modified_base 18: mod_base = OTHER; note = 2'-O-methylcytidine-3'-phosphate
  modified_base 19: mod_base = OTHER; note = 2'-O-methyladenosine-3'-phosphate
  modified_base 20: mod_base = OTHER; note = 2'-O-methylcytidine-3'-phosphate
  modified_base 21: mod_base = OTHER; note = 2'-O-methyladenosine-3'-phosphorothioate
  modified_base 22: mod_base = OTHER; note = 2'-O-methyladenosine-3'-phosphorothioate
  modified_base 23: mod_base = OTHER; note = 2'-O-methyladenosine
acaattcgtttgttgtccacaaa

SEQ ID NO: 1324 - RNA, 23 nt, synthetic construct
  source 1..23: mol_type = other RNA
  modified_base 1: mod_base = OTHER; note = 2'-O-methyladenosine-3'-phosphorothioate
  modified_base 2: mod_base = OTHER; note = 2'-deoxy-2'-fluorocytidine-3'-phosphorothioate
  modified_base 3: mod_base = OTHER; note = 2'-O-methyladenosine-3'-phosphate
  modified_base 4: mod_base = OTHER; note = 2'-O-methyladenosine-3'-phosphate
  modified_base 5: mod_base = OTHER; note = 2'-O-methyladenosine-3'-phosphate
  modified_base 6: mod_base = OTHER; note = 2'-deoxy-2'-fluorouridine-3'-phosphate
  modified_base 7: mod_base = OTHER; note = 2'-O-methyluridine-3'-phosphate
  modified_base 8: mod_base = OTHER; note = 2'-deoxy-2'-fluoroguanosine-3'-phosphate
  modified_base 9: mod_base = OTHER; note = 2'-deoxy-2'-fluorocytidine-3'-phosphate
  modified_base 10: mod_base = OTHER; note = 2'-O-methyladenosine-3'-phosphate
  modified_base 11: mod_base = OTHER; note = 2'-O-methyladenosine-3'-phosphate
  modified_base 12: mod_base = OTHER; note = 2'-O-methyluridine-3'-phosphate
  modified_base 13: mod_base = OTHER; note = 2'-O-methyluridine-3'-phosphate
  modified_base 14: mod_base = OTHER; note = 2'-deoxy-2'-fluorocytidine-3'-phosphate
  modified_base 15: mod_base = OTHER; note = 2'-O-methylguanosine-3'-phosphate
  modified_base 16: mod_base = OTHER; note = 2'-deoxy-2'-fluorouridine-3'-phosphate
  modified_base 17: mod_base = OTHER; note = 2'-O-methyluridine-3'-phosphate
  modified_base 18: mod_base = OTHER; note = 2'-O-methyluridine-3'-phosphate
  modified_base 19: mod_base = OTHER; note = 2'-O-methylguanosine-3'-phosphate
  modified_base 20: mod_base = OTHER; note = 2'-O-methyluridine-3'-phosphate
  modified_base 21: mod_base = OTHER; note = 2'-O-methyluridine-3'-phosphorothioate
  modified_base 22: mod_base = OTHER; note = 2'-O-methylguanosine-3'-phosphorothioate
  modified_base 23: mod_base = OTHER; note = 2'-O-methyluridine
acaaattgcaattcgtttgttgt

SEQ ID NO: 1325 - RNA, 23 nt, synthetic construct
  source 1..23: mol_type = other RNA
  modified_base 1: mod_base = OTHER; note = 2'-O-methyladenosine-3'-phosphorothioate
  modified_base 2: mod_base = OTHER; note = 2'-deoxy-2'-fluorouridine-3'-phosphorothioate
  modified_base 3: mod_base = OTHER; note = 2'-O-methyladenosine-3'-phosphate
  modified_base 4: mod_base = OTHER; note = 2'-O-methylcytidine-3'-phosphate
  modified_base 5: mod_base = OTHER; note = 2'-O-methylguanosine-3'-phosphate
  modified_base 6: mod_base = OTHER; note = 2'-deoxy-2'-fluorouridine-3'-phosphate
  modified_base 7: mod_base = OTHER; note = 2'-O-methyladenosine-3'-phosphate
  modified_base 8: mod_base = OTHER; note = 2'-deoxy-2'-fluorocytidine-3'-phosphate
  modified_base 9: mod_base = OTHER; note = 2'-deoxy-2'-fluorocytidine-3'-phosphate
  modified_base 10: mod_base = OTHER; note = 2'-O-methylcytidine-3'-phosphate
  modified_base 11: mod_base = OTHER; note = 2'-O-methyluridine-3'-phosphate
  modified_base 12: mod_base = OTHER; note = 2'-O-methylcytidine-3'-phosphate
  modified_base 13: mod_base = OTHER; note = 2'-O-methylcytidine-3'-phosphate
  modified_base 14: mod_base = OTHER; note = 2'-deoxy-2'-fluoroadenosine-3'-phosphate
  modified_base 15: mod_base = OTHER; note = 2'-O-methyluridine-3'-phosphate
  modified_base 16: mod_base = OTHER; note = 2'-deoxy-2'-fluoroadenosine-3'-phosphate
  modified_base 17: mod_base = OTHER; note = 2'-O-methyluridine-3'-phosphate
  modified_base 18: mod_base = OTHER; note = 2'-O-methylguanosine-3'-phosphate
  modified_base 19: mod_base = OTHER; note = 2'-O-methyladenosine-3'-phosphate
  modified_base 20: mod_base = OTHER; note = 2'-O-methylcytidine-3'-phosphate
  modified_base 21: mod_base = OTHER; note = 2'-O-methylcytidine-3'-phosphorothioate
  modified_base 22: mod_base = OTHER; note = 2'-O-methyladenosine-3'-phosphorothioate
  modified_base 23: mod_base = OTHER; note = 2'-O-methylguanosine
atacgtaccctccatatgaccag

SEQ ID NO: 1326 - RNA, 23 nt, synthetic construct
  source 1..23: mol_type = other RNA
  modified_base 1: mod_base = OTHER; note = 2'-O-methyladenosine-3'-phosphorothioate
  modified_base 2: mod_base = OTHER; note = 2'-deoxy-2'-fluoroadenosine-3'-phosphorothioate
  modified_base 3: mod_base = OTHER; note = 2'-O-methylcytidine-3'-phosphate
  modified_base 4: mod_base = OTHER; note = 2'-O-methylcytidine-3'-phosphate
  modified_base 5: mod_base = OTHER; note = 2'-O-methyladenosine-3'-phosphate
  modified_base 6: mod_base = OTHER; note = 2'-deoxy-2'-fluorouridine-3'-phosphate
  modified_base 7: mod_base = OTHER; note = 2'-O-methyluridine-3'-phosphate
  modified_base 8: mod_base = OTHER; note = 2'-deoxy-2'-fluoroguanosine-3'-phosphate
  modified_base 9: mod_base = OTHER; note = 2'-deoxy-2'-fluoroadenosine-3'-phosphate
  modified_base 10: mod_base = OTHER; note = 2'-O-methylguanosine-3'-phosphate
  modified_base 11: mod_base = OTHER; note = 2'-O-methylguanosine-3'-phosphate
  modified_base 12: mod_base = OTHER; note = 2'-O-methyluridine-3'-phosphate
  modified_base 13: mod_base = OTHER; note = 2'-O-methyluridine-3'-phosphate
  modified_base 14: mod_base = OTHER; note = 2'-deoxy-2'-fluoroadenosine-3'-phosphate
  modified_base 15: mod_base = OTHER; note = 2'-O-methylcytidine-3'-phosphate
  modified_base 16: mod_base = OTHER; note = 2'-deoxy-2'-fluoroguanosine-3'-phosphate
  modified_base 17: mod_base = OTHER; note = 2'-O-methyluridine-3'-phosphate
  modified_base 18: mod_base = OTHER; note = 2'-O-methyladenosine-3'-phosphate
  modified_base 19: mod_base = OTHER; note = 2'-O-methylcytidine-3'-phosphate
  modified_base 20: mod_base = OTHER; note = 2'-O-methylcytidine-3'-phosphate
  modified_base 21: mod_base = OTHER; note = 2'-O-methylcytidine-3'-phosphorothioate
  modified_base 22: mod_base = OTHER; note = 2'-O-methyluridine-3'-phosphorothioate
  modified_base 23: mod_base = OTHER; note = 2'-O-methylcytidine
aaccattgaggttacgtaccctc

SEQ ID NO: 1327 - RNA, 23 nt, synthetic construct
  source 1..23: mol_type = other RNA
  modified_base 1: mod_base = OTHER; note = 2'-O-methyladenosine-3'-phosphorothioate
  modified_base 2: mod_base = OTHER; note = 2'-deoxy-2'-fluorouridine-3'-phosphorothioate
  modified_base 3: mod_base = OTHER; note = 2'-O-methylguanosine-3'-phosphate
  modified_base 4: mod_base = OTHER; note = 2'-O-methyladenosine-3'-phosphate
  modified_base 5: mod_base = OTHER; note = 2'-O-methyladenosine-3'-phosphate
  modified_base 6: mod_base = OTHER; note = 2'-deoxy-2'-fluorocytidine-3'-phosphate
  modified_base 7: mod_base = OTHER; note = 2'-O-methyladenosine-3'-phosphate
  modified_base 8: mod_base = OTHER; note = 2'-deoxy-2'-fluorocytidine-3'-phosphate
  modified_base 9: mod_base = OTHER; note = 2'-deoxy-2'-fluoroguanosine-3'-phosphate
  modified_base 10: mod_base = OTHER; note = 2'-O-methylcytidine-3'-phosphate
  modified_base 11: mod_base = OTHER; note = 2'-O-methylcytidine-3'-phosphate
  modified_base 12: mod_base = OTHER; note = 2'-O-methyladenosine-3'-phosphate
  modified_base 13: mod_base = OTHER; note = 2'-O-methylcytidine-3'-phosphate
  modified_base 14: mod_base = OTHER; note = 2'-deoxy-2'-fluorouridine-3'-phosphate
  modified_base 15: mod_base = OTHER; note = 2'-O-methyluridine-3'-phosphate
  modified_base 16: mod_base = OTHER; note = 2'-deoxy-2'-fluorocytidine-3'-phosphate
  modified_base 17: mod_base = OTHER; note = 2'-O-methylcytidine-3'-phosphate
  modified_base 18: mod_base = OTHER; note = 2'-O-methylcytidine-3'-phosphate
  modified_base 19: mod_base = OTHER; note = 2'-O-methylguanosine-3'-phosphate
  modified_base 20: mod_base = OTHER; note = 2'-O-methyladenosine-3'-phosphate
  modified_base 21: mod_base = OTHER; note = 2'-O-methyluridine-3'-phosphorothioate
  modified_base 22: mod_base = OTHER; note = 2'-O-methylcytidine-3'-phosphorothioate
  modified_base 23: mod_base = OTHER; note = 2'-O-methylcytidine
atgaacacgccacttcccgatcc

SEQ ID NO: 1328 - RNA, 23 nt, synthetic construct
  source 1..23: mol_type = other RNA
  modified_base 1: mod_base = OTHER; note = 2'-O-methyladenosine-3'-phosphorothioate
  modified_base 2: mod_base = OTHER; note = 2'-deoxy-2'-fluorouridine-3'-phosphorothioate
  modified_base 3: mod_base = OTHER; note = 2'-O-methyluridine-3'-phosphate
  modified_base 4: mod_base = OTHER; note = 2'-O-methylcytidine-3'-phosphate
  modified_base 5: mod_base = OTHER; note = 2'-O-methylcytidine-3'-phosphate
  modified_base 6: mod_base = OTHER; note = 2'-deoxy-2'-fluoroadenosine-3'-phosphate
  modified_base 7: mod_base = OTHER; note = 2'-O-methylcytidine-3'-phosphate
  modified_base 8: mod_base = OTHER; note = 2'-deoxy-2'-fluoroadenosine-3'-phosphate
  modified_base 9: mod_base = OTHER; note = 2'-deoxy-2'-fluorocytidine-3'-phosphate
  modified_base 10: mod_base = OTHER; note = 2'-O-methyluridine-3'-phosphate
  modified_base 11: mod_base = OTHER; note = 2'-O-methyluridine-3'-phosphate
  modified_base 12: mod_base = OTHER; note = 2'-O-methylguanosine-3'-phosphate
  modified_base 13: mod_base = OTHER; note = 2'-O-methyladenosine-3'-phosphate
  modified_base 14: mod_base = OTHER; note = 2'-deoxy-2'-fluoroadenosine-3'-phosphate
  modified_base 15: mod_base = OTHER; note = 2'-O-methylcytidine-3'-phosphate
  modified_base 16: mod_base = OTHER; note = 2'-deoxy-2'-fluoroadenosine-3'-phosphate
  modified_base 17: mod_base = OTHER; note = 2'-O-methylcytidine-3'-phosphate
  modified_base 18: mod_base = OTHER; note = 2'-O-methylguanosine-3'-phosphate
  modified_base 19: mod_base = OTHER; note = 2'-O-methylcytidine-3'-phosphate
  modified_base 20: mod_base = OTHER; note = 2'-O-methylcytidine-3'-phosphate
  modified_base 21: mod_base = OTHER; note = 2'-O-methyladenosine-3'-phosphorothioate
  modified_base 22: mod_base = OTHER; note = 2'-O-methylcytidine-3'-phosphorothioate
  modified_base 23: mod_base = OTHER; note = 2'-O-methyluridine
attccacacttgaacacgccact

SEQ ID NO: 1329 - RNA, 23 nt, synthetic construct
  source 1..23: mol_type = other RNA
  modified_base 1: mod_base = OTHER; note = 2'-O-methyladenosine-3'-phosphorothioate
  modified_base 2: mod_base = OTHER; note = 2'-deoxy-2'-fluoroadenosine-3'-phosphorothioate
  modified_base 3: mod_base = OTHER; note = 2'-O-methylcytidine-3'-phosphate
  modified_base 4: mod_base = OTHER; note = 2'-O-methylguanosine-3'-phosphate
  modified_base 5: mod_base = OTHER; note = 2'-O-methylguanosine-3'-phosphate
  modified_base 6: mod_base = OTHER; note = 2'-deoxy-2'-fluorocytidine-3'-phosphate
  modified_base 7: mod_base = OTHER; note = 2'-O-methyluridine-3'-phosphate
  modified_base 8: mod_base = OTHER; note = 2'-deoxy-2'-fluoroadenosine-3'-phosphate
  modified_base 9: mod_base = OTHER; note = 2'-deoxy-2'-fluorouridine-3'-phosphate
  modified_base 10: mod_base = OTHER; note = 2'-O-methyluridine-3'-phosphate
  modified_base 11: mod_base = OTHER; note = 2'-O-methylcytidine-3'-phosphate
  modified_base 12: mod_base = OTHER; note = 2'-O-methylcytidine-3'-phosphate
  modified_base 13: mod_base = OTHER; note = 2'-O-methyladenosine-3'-phosphate
  modified_base 14: mod_base = OTHER; note = 2'-deoxy-2'-fluorocytidine-3'-phosphate
  modified_base 15: mod_base = OTHER; note = 2'-O-methyladenosine-3'-phosphate
  modified_base 16: mod_base = OTHER; note = 2'-deoxy-2'-fluorocytidine-3'-phosphate
  modified_base 17: mod_base = OTHER; note = 2'-O-methyluridine-3'-phosphate
  modified_base 18: mod_base = OTHER; note = 2'-O-methyluridine-3'-phosphate
  modified_base 19: mod_base = OTHER; note = 2'-O-methylguanosine-3'-phosphate
  modified_base 20: mod_base = OTHER; note = 2'-O-methyladenosine-3'-phosphate
  modified_base 21: mod_base = OTHER; note = 2'-O-methyladenosine-3'-phosphorothioate
  modified_base 22: mod_base = OTHER; note = 2'-O-methylcytidine-3'-phosphorothioate
  modified_base 23: mod_base = OTHER; note = 2'-O-methyladenosine
aacggctattccacacttgaaca

SEQ ID NO: 1330 - RNA, 23 nt, synthetic construct
  source 1..23: mol_type = other RNA
  modified_base 1: mod_base = OTHER; note = 2'-O-methyladenosine-3'-phosphorothioate
  modified_base 2: mod_base = OTHER; note = 2'-deoxy-2'-fluoroadenosine-3'-phosphorothioate
  modified_base 3: mod_base = OTHER; note = 2'-O-methylcytidine-3'-phosphate
  modified_base 4: mod_base = OTHER; note = 2'-O-methyluridine-3'-phosphate
  modified_base 5: mod_base = OTHER; note = 2'-O-methylguanosine-3'-phosphate
  modified_base 6: mod_base = OTHER; note = 2'-deoxy-2'-fluoroadenosine-3'-phosphate
  modified_base 7: mod_base = OTHER; note = 2'-O-methylguanosine-3'-phosphate
  modified_base 8: mod_base = OTHER; note = 2'-deoxy-2'-fluorouridine-3'-phosphate
  modified_base 9: mod_base = OTHER; note = 2'-deoxy-2'-fluorocytidine-3'-phosphate
  modified_base 10: mod_base = OTHER; note = 2'-O-methyladenosine-3'-phosphate
  modified_base 11: mod_base = OTHER; note = 2'-O-methyluridine-3'-phosphate
  modified_base 12: mod_base = OTHER; note = 2'-O-methyladenosine-3'-phosphate
  modified_base 13: mod_base = OTHER; note = 2'-O-methylguanosine-3'-phosphate
  modified_base 14: mod_base = OTHER; note = 2'-deoxy-2'-fluorouridine-3'-phosphate
  modified_base 15: mod_base = OTHER; note = 2'-O-methyladenosine-3'-phosphate
  modified_base 16: mod_base = OTHER; note = 2'-deoxy-2'-fluorocytidine-3'-phosphate
  modified_base 17: mod_base = OTHER; note = 2'-O-methyluridine-3'-phosphate
  modified_base 18: mod_base = OTHER; note = 2'-O-methylcytidine-3'-phosphate
  modified_base 19: mod_base = OTHER; note = 2'-O-methylcytidine-3'-phosphate
  modified_base 20: mod_base = OTHER; note = 2'-O-methylcytidine-3'-phosphate
  modified_base 21: mod_base = OTHER; note = 2'-O-methyladenosine-3'-phosphorothioate
  modified_base 22: mod_base = OTHER; note = 2'-O-methylcytidine-3'-phosphorothioate
  modified_base 23: mod_base = OTHER; note = 2'-O-methylcytidine
aactgagtcatagtactcccacc

SEQ ID NO: 1331 - RNA, 23 nt, synthetic construct
  source 1..23: mol_type = other RNA
  modified_base 1: mod_base = OTHER; note = 2'-O-methyladenosine-3'-phosphorothioate
  modified_base 2: mod_base = OTHER; note = 2'-deoxy-2'-fluorouridine-3'-phosphorothioate
  modified_base 3: mod_base = OTHER; note = 2'-O-methyluridine-3'-phosphate
  modified_base 4: mod_base = OTHER; note = 2'-O-methylcytidine-3'-phosphate
  modified_base 5: mod_base = OTHER; note = 2'-O-methyluridine-3'-phosphate
  modified_base 6: mod_base = OTHER; note = 2'-deoxy-2'-fluoroguanosine-3'-phosphate
  modified_base 7: mod_base = OTHER; note = 2'-O-methyluridine-3'-phosphate
  modified_base 8: mod_base = OTHER; note = 2'-deoxy-2'-fluoroguanosine-3'-phosphate
  modified_base 9: mod_base = OTHER; note = 2'-deoxy-2'-fluorouridine-3'-phosphate
  modified_base 10: mod_base = OTHER; note = 2'-O-methyladenosine-3'-phosphate
  modified_base 11: mod_base = OTHER; note = 2'-O-methylcytidine-3'-phosphate
  modified_base 12: mod_base = OTHER; note = 2'-O-methyladenosine-3'-phosphate
  modified_base 13: mod_base = OTHER; note = 2'-O-methylcytidine-3'-phosphate
  modified_base 14: mod_base = OTHER; note = 2'-deoxy-2'-fluorouridine-3'-phosphate
  modified_base 15: mod_base = OTHER; note = 2'-O-methylguanosine-3'-phosphate
  modified_base 16: mod_base = OTHER; note = 2'-deoxy-2'-fluoroadenosine-3'-phosphate
  modified_base 17: mod_base = OTHER; note = 2'-O-methylguanosine-3'-phosphate
  modified_base 18: mod_base = OTHER; note = 2'-O-methyluridine-3'-phosphate
  modified_base 19: mod_base = OTHER; note = 2'-O-methylcytidine-3'-phosphate
  modified_base 20: mod_base = OTHER; note = 2'-O-methyladenosine-3'-phosphate
  modified_base 21: mod_base = OTHER; note = 2'-O-methyluridine-3'-phosphorothioate
  modified_base 22: mod_base = OTHER; note = 2'-O-methyladenosine-3'-phosphorothioate
  modified_base 23: mod_base = OTHER; note = 2'-O-methylguanosine
attctgtgtacactgagtcatag

SEQ ID NO: 1332 - RNA, 23 nt, synthetic construct
  source 1..23: mol_type = other RNA
  modified_base 1: mod_base = OTHER; note = 2'-O-methyladenosine-3'-phosphorothioate
  modified_base 2: mod_base = OTHER; note = 2'-deoxy-2'-fluoroadenosine-3'-phosphorothioate
  modified_base 3: mod_base = OTHER; note = 2'-O-methyluridine-3'-phosphate
  modified_base 4: mod_base = OTHER; note = 2'-O-methylguanosine-3'-phosphate
  modified_base 5: mod_base = OTHER; note = 2'-O-methyluridine-3'-phosphate
  modified_base 6: mod_base = OTHER; note = 2'-deoxy-2'-fluoroadenosine-3'-phosphate
  modified_base 7: mod_base = OTHER; note = 2'-O-methyladenosine-3'-phosphate
  modified_base 8: mod_base = OTHER; note = 2'-deoxy-2'-fluorocytidine-3'-phosphate
  modified_base 9: mod_base = OTHER; note = 2'-deoxy-2'-fluoroguanosine-3'-phosphate
  modified_base 10: mod_base = OTHER; note = 2'-O-methyluridine-3'-phosphate
  modified_base 11: mod_base = OTHER; note = 2'-O-methyluridine-3'-phosphate
  modified_base 12: mod_base = OTHER; note = 2'-O-methylcytidine-3'-phosphate
  modified_base 13: mod_base = OTHER; note = 2'-O-methyluridine-3'-phosphate
  modified_base 14: mod_base = OTHER; note = 2'-deoxy-2'-fluoroguanosine-3'-phosphate
  modified_base 15: mod_base = OTHER; note = 2'-O-methyluridine-3'-phosphate
  modified_base 16: mod_base = OTHER; note = 2'-deoxy-2'-fluoroguanosine-3'-phosphate
  modified_base 17: mod_base = OTHER; note = 2'-O-methyluridine-3'-phosphate
  modified_base 18: mod_base = OTHER; note = 2'-O-methyladenosine-3'-phosphate
  modified_base 19: mod_base = OTHER; note = 2'-O-methylcytidine-3'-phosphate
  modified_base 20: mod_base = OTHER; note = 2'-O-methyladenosine-3'-phosphate
  modified_base 21: mod_base = OTHER; note = 2'-O-methylcytidine-3'-phosphorothioate
  modified_base 22: mod_base = OTHER; note = 2'-O-methyluridine-3'-phosphorothioate
  modified_base 23: mod_base = OTHER; note = 2'-O-methylguanosine
aatgtaacgttctgtgtacactg

SEQ ID NO: 1333 - RNA, 23 nt, synthetic construct
  source 1..23: mol_type = other RNA
  modified_base 1: mod_base = OTHER; note = 2'-O-methyladenosine-3'-phosphorothioate
  modified_base 2: mod_base = OTHER; note = 2'-deoxy-2'-fluoroadenosine-3'-phosphorothioate
  modified_base 3: mod_base = OTHER; note = 2'-O-methylguanosine-3'-phosphate
  modified_base 4: mod_base = OTHER; note = 2'-O-methyladenosine-3'-phosphate
  modified_base 5: mod_base = OTHER; note = 2'-O-methylcytidine-3'-phosphate
  modified_base 6: mod_base = OTHER; note = 2'-deoxy-2'-fluorocytidine-3'-phosphate
  modified_base 7: mod_base = OTHER; note = 2'-O-methylcytidine-3'-phosphate
  modified_base 8: mod_base = OTHER; note = 2'-deoxy-2'-fluoroadenosine-3'-phosphate
  modified_base 9: mod_base = OTHER; note = 2'-deoxy-2'-fluorouridine-3'-phosphate
  modified_base 10: mod_base = OTHER; note = 2'-O-methylguanosine-3'-phosphate
  modified_base 11: mod_base = OTHER; note = 2'-O-methyluridine-3'-phosphate
  modified_base 12: mod_base = OTHER; note = 2'-O-methyladenosine-3'-phosphate
  modified_base 13: mod_base = OTHER; note = 2'-O-methyladenosine-3'-phosphate
  modified_base 14: mod_base = OTHER; note = 2'-deoxy-2'-fluorocytidine-3'-phosphate
  modified_base 15: mod_base = OTHER; note = 2'-O-methylguanosine-3'-phosphate
  modified_base 16: mod_base = OTHER; note = 2'-deoxy-2'-fluorouridine-3'-phosphate
  modified_base 17: mod_base = OTHER; note = 2'-O-methyluridine-3'-phosphate
  modified_base 18: mod_base = OTHER; note = 2'-O-methylcytidine-3'-phosphate
  modified_base 19: mod_base = OTHER; note = 2'-O-methyluridine-3'-phosphate
  modified_base 20: mod_base = OTHER; note = 2'-O-methylguanosine-3'-phosphate
  modified_base 21: mod_base = OTHER; note = 2'-O-methyluridine-3'-phosphorothioate
  modified_base 22: mod_base = OTHER; note = 2'-O-methylguanosine-3'-phosphorothioate
  modified_base 23: mod_base = OTHER; note = 2'-O-methyluridine
aagacccatgtaacgttctgtgt

SEQ ID NO: 1334 - RNA, 23 nt, synthetic construct
  source 1..23: mol_type = other RNA
  modified_base 1: mod_base = OTHER; note = 2'-O-methyladenosine-3'-phosphorothioate
  modified_base 2: mod_base = OTHER; note = 2'-deoxy-2'-fluoroadenosine-3'-phosphorothioate
  modified_base 3: mod_base = OTHER; note = 2'-O-methylguanosine-3'-phosphate
  modified_base 4: mod_base = OTHER; note = 2'-O-methyluridine-3'-phosphate
  modified_base 5: mod_base = OTHER; note = 2'-O-methyluridine-3'-phosphate
  modified_base 6: mod_base = OTHER; note = 2'-deoxy-2'-fluoroguanosine-3'-phosphate
  modified_base 7: mod_base = OTHER; note = 2'-O-methylguanosine-3'-phosphate
  modified_base 8: mod_base = OTHER; note = 2'-deoxy-2'-fluoroguanosine-3'-phosphate
  modified_base 9: mod_base = OTHER; note = 2'-deoxy-2'-fluoroadenosine-3'-phosphate
  modified_base 10: mod_base = OTHER; note = 2'-O-methylguanosine-3'-phosphate
  modified_base 11: mod_base = OTHER; note = 2'-O-methyladenosine-3'-phosphate
  modified_base 12: mod_base = OTHER; note = 2'-O-methylcytidine-3'-phosphate
  modified_base 13: mod_base = OTHER; note = 2'-O-methylcytidine-3'-phosphate
  modified_base 14: mod_base = OTHER; note = 2'-deoxy-2'-fluorocytidine-3'-phosphate
  modified_base 15: mod_base = OTHER; note = 2'-O-methyladenosine-3'-phosphate
  modified_base 16: mod_base = OTHER; note = 2'-deoxy-2'-fluorouridine-3'-phosphate
  modified_base 17: mod_base = OTHER; note = 2'-O-methylguanosine-3'-phosphate
  modified_base 18: mod_base = OTHER; note = 2'-O-methyluridine-3'-phosphate
  modified_base 19: mod_base = OTHER; note = 2'-O-methyladenosine-3'-phosphate
  modified_base 20: mod_base = OTHER; note = 2'-O-methyladenosine-3'-phosphate
  modified_base 21: mod_base = OTHER; note = 2'-O-methylcytidine-3'-phosphorothioate
  modified_base 22: mod_base = OTHER; note = 2'-O-methylguanosine-3'-phosphorothioate
  modified_base 23: mod_base = OTHER; note = 2'-O-methyluridine
aagttgggagacccatgtaacgt

SEQ ID NO: 1335 - RNA, 23 nt, synthetic construct
  source 1..23: mol_type = other RNA
  modified_base 1: mod_base = OTHER; note = 2'-O-methyladenosine-3'-phosphorothioate
  modified_base 2: mod_base = OTHER; note = 2'-deoxy-2'-fluorouridine-3'-phosphorothioate
  modified_base 3: mod_base = OTHER; note = 2'-O-methylcytidine-3'-phosphate
  modified_base 4: mod_base = OTHER; note = 2'-O-methyluridine-3'-phosphate
  modified_base 5: mod_base = OTHER; note = 2'-O-methyluridine-3'-phosphate
  modified_base 6: mod_base = OTHER; note = 2'-deoxy-2'-fluorocytidine-3'-phosphate
  modified_base 7: mod_base = OTHER; note = 2'-O-methyluridine-3'-phosphate
  modified_base 8: mod_base = OTHER; note = 2'-deoxy-2'-fluoroguanosine-3'-phosphate
  modified_base 9: mod_base = OTHER; note = 2'-deoxy-2'-fluoroguanosine-3'-phosphate
  modified_base 10: mod_base = OTHER; note = 2'-O-methyladenosine-3'-phosphate
  modified_base 11: mod_base = OTHER; note = 2'-O-methylguanosine-3'-phosphate
  modified_base 12: mod_base = OTHER; note = 2'-O-methyluridine-3'-phosphate
  modified_base 13: mod_base = OTHER; note = 2'-O-methyluridine-3'-phosphate
  modified_base 14: mod_base = OTHER; note = 2'-deoxy-2'-fluoroguanosine-3'-phosphate
  modified_base 15: mod_base = OTHER; note = 2'-O-methylguanosine-3'-phosphate
  modified_base 16: mod_base = OTHER; note = 2'-deoxy-2'-fluoroguanosine-3'-phosphate
  modified_base 17: mod_base = OTHER; note = 2'-O-methyladenosine-3'-phosphate
  modified_base 18: mod_base = OTHER; note = 2'-O-methylguanosine-3'-phosphate
  modified_base 19: mod_base = OTHER; note = 2'-O-methyladenosine-3'-phosphate
  modified_base 20: mod_base = OTHER; note = 2'-O-methylcytidine-3'-phosphate
  modified_base 21: mod_base = OTHER; note = 2'-O-methylcytidine-3'-phosphorothioate
  modified_base 22: mod_base = OTHER; note = 2'-O-methylcytidine-3'-phosphorothioate
  modified_base 23: mod_base = OTHER; note = 2'-O-methyladenosine
atcttctggagttgggagaccca

SEQ ID NO: 1336 - RNA, 23 nt, synthetic construct
  source 1..23: mol_type = other RNA
  modified_base 1: mod_base = OTHER; note = 2'-O-methyladenosine-3'-phosphorothioate
  modified_base 2: mod_base = OTHER; note = 2'-deoxy-2'-fluoroadenosine-3'-phosphorothioate
  modified_base 3: mod_base = OTHER; note = 2'-O-methyladenosine-3'-phosphate
  modified_base 4: mod_base = OTHER; note = 2'-O-methylguanosine-3'-phosphate
  modified_base 5: mod_base = OTHER; note = 2'-O-methylguanosine-3'-phosphate
  modified_base 6: mod_base = OTHER; note = 2'-deoxy-2'-fluorouridine-3'-phosphate
  modified_base 7: mod_base = OTHER; note = 2'-O-methyluridine-3'-phosphate
  modified_base 8: mod_base = OTHER; note = 2'-deoxy-2'-fluoroguanosine-3'-phosphate
  modified_base 9: mod_base = OTHER; note = 2'-deoxy-2'-fluorouridine-3'-phosphate
  modified_base 10: mod_base = OTHER; note = 2'-O-methylcytidine-3'-phosphate
  modified_base 11: mod_base = OTHER; note = 2'-O-methyluridine-3'-phosphate
  modified_base 12: mod_base = OTHER; note = 2'-O-methyluridine-3'-phosphate
  modified_base 13: mod_base = OTHER; note = 2'-O-methylcytidine-3'-phosphate
  modified_base 14: mod_base = OTHER; note = 2'-deoxy-2'-fluorouridine-3'-phosphate
  modified_base 15: mod_base = OTHER; note = 2'-O-methylguanosine-3'-phosphate
  modified_base 16: mod_base = OTHER; note = 2'-deoxy-2'-fluoroguanosine-3'-phosphate
  modified_base 17: mod_base = OTHER; note = 2'-O-methyladenosine-3'-phosphate
  modified_base 18: mod_base = OTHER; note = 2'-O-methylguanosine-3'-phosphate
  modified_base 19: mod_base = OTHER; note = 2'-O-methyluridine-3'-phosphate
  modified_base 20: mod_base = OTHER; note = 2'-O-methyluridine-3'-phosphate
  modified_base 21: mod_base = OTHER; note = 2'-O-methylguanosine-3'-phosphorothioate
  modified_base 22: mod_base = OTHER; note = 2'-O-methylguanosine-3'-phosphorothioate
  modified_base 23: mod_base = OTHER; note = 2'-O-methylguanosine
aaaggttgtcttctggagttggg

SEQ ID NO: 1337 - RNA, 23 nt, synthetic construct
  source 1..23: mol_type = other RNA
  modified_base 1: mod_base = OTHER; note = 2'-O-methyladenosine-3'-phosphorothioate
  modified_base 2: mod_base = OTHER; note = 2'-deoxy-2'-fluorocytidine-3'-phosphorothioate
  modified_base 3: mod_base = OTHER; note = 2'-O-methyluridine-3'-phosphate
  modified_base 4: mod_base = OTHER; note = 2'-O-methylguanosine-3'-phosphate
  modified_base 5: mod_base = OTHER; note = 2'-O-methyluridine-3'-phosphate
  modified_base 6: mod_base = OTHER; note = 2'-deoxy-2'-fluoroadenosine-3'-phosphate
  modified_base 7: mod_base = OTHER; note = 2'-O-methyladenosine-3'-phosphate
  modified_base 8: mod_base = OTHER; note = 2'-deoxy-2'-fluorouridine-3'-phosphate
  modified_base 9: mod_base = OTHER; note = 2'-deoxy-2'-fluoroguanosine-3'-phosphate
  modified_base 10: mod_base = OTHER; note = 2'-O-methylguanosine-3'-phosphate
  modified_base 11: mod_base = OTHER; note = 2'-O-methyluridine-3'-phosphate
  modified_base 12: mod_base = OTHER; note = 2'-O-methylcytidine-3'-phosphate
  modified_base 13: mod_base = OTHER; note = 2'-O-methyladenosine-3'-phosphate
  modified_base 14: mod_base = OTHER; note = 2'-deoxy-2'-fluoroadenosine-3'-phosphate
  modified_base 15: mod_base = OTHER; note = 2'-O-methylguanosine-3'-phosphate
  modified_base 16: mod_base = OTHER; note = 2'-deoxy-2'-fluoroguanosine-3'-phosphate
  modified_base 17: mod_base = OTHER; note = 2'-O-methyluridine-3'-phosphate
  modified_base 18: mod_base = OTHER; note = 2'-O-methyluridine-3'-phosphate
  modified_base 19: mod_base = OTHER; note = 2'-O-methylguanosine-3'-phosphate
  modified_base 20: mod_base = OTHER; note = 2'-O-methyluridine-3'-phosphate
  modified_base 21: mod_base = OTHER; note = 2'-O-methylcytidine-3'-phosphorothioate
  modified_base 22: mod_base = OTHER; note = 2'-O-methyluridine-3'-phosphorothioate
  modified_base 23: mod_base = OTHER; note = 2'-O-methyluridine
actgtaatggtcaaggttgtctt

SEQ ID NO: 1338 - RNA, 23 nt, synthetic construct
  source 1..23: mol_type = other RNA
  modified_base 1: mod_base = OTHER; note = 2'-O-methyladenosine-3'-phosphorothioate
  modified_base 2: mod_base = OTHER; note = 2'-deoxy-2'-fluoroguanosine-3'-phosphorothioate
  modified_base 3: mod_base = OTHER; note = 2'-O-methyladenosine-3'-phosphate
  modified_base 4: mod_base = OTHER; note = 2'-O-methyladenosine-3'-phosphate
  modified_base 5: mod_base = OTHER; note = 2'-O-methyluridine-3'-phosphate
  modified_base 6: mod_base = OTHER; note = 2'-deoxy-2'-fluorouridine-3'-phosphate
  modified_base 7: mod_base = OTHER; note = 2'-O-methyluridine-3'-phosphate
  modified_base 8: mod_base = OTHER; note = 2'-deoxy-2'-fluorocytidine-3'-phosphate
  modified_base 9: mod_base = OTHER; note = 2'-deoxy-2'-fluorouridine-3'-phosphate
  modified_base 10: mod_base = OTHER; note = 2'-O-methylguanosine-3'-phosphate
  modified_base 11: mod_base = OTHER; note = 2'-O-methyluridine-3'-phosphate
  modified_base 12: mod_base = OTHER; note = 2'-O-methyladenosine-3'-phosphate
  modified_base 13: mod_base = OTHER; note = 2'-O-methyladenosine-3'-phosphate
  modified_base 14: mod_base = OTHER; note = 2'-deoxy-2'-fluorouridine-3'-phosphate
  modified_base 15: mod_base = OTHER; note = 2'-O-methylguanosine-3'-phosphate
  modified_base 16: mod_base = OTHER; note = 2'-deoxy-2'-fluoroguanosine-3'-phosphate
  modified_base 17: mod_base = OTHER; note = 2'-O-methyluridine-3'-phosphate
  modified_base 18: mod_base = OTHER; note = 2'-O-methylcytidine-3'-phosphate
  modified_base 19: mod_base = OTHER; note = 2'-O-methyladenosine-3'-phosphate
  modified_base 20: mod_base = OTHER; note = 2'-O-methyladenosine-3'-phosphate
  modified_base 21: mod_base = OTHER; note = 2'-O-methylguanosine-3'-phosphorothioate
  modified_base 22: mod_base = OTHER; note = 2'-O-methylguanosine-3'-phosphorothioate
  modified_base 23: mod_base = OTHER; note = 2'-O-methyluridine
agaatttctgtaatggtcaaggt

SEQ ID NO: 1339 - RNA, 23 nt, synthetic construct
  source 1..23: mol_type = other RNA
  modified_base 1: mod_base = OTHER; note = 2'-O-methyladenosine-3'-phosphorothioate
  modified_base 2: mod_base = OTHER; note = 2'-deoxy-2'-fluoroguanosine-3'-phosphorothioate
  modified_base 3: mod_base = OTHER; note = 2'-O-methyladenosine-3'-phosphate
  modified_base 4: mod_base = OTHER; note = 2'-O-methylcytidine-3'-phosphate
  modified_base 5: mod_base = OTHER; note = 2'-O-methyluridine-3'-phosphate
  modified_base 6: mod_base = OTHER; note = 2'-deoxy-2'-fluoroguanosine-3'-phosphate
  modified_base 7: mod_base = OTHER; note = 2'-O-methyluridine-3'-phosphate
  modified_base 8: mod_base = OTHER; note = 2'-deoxy-2'-fluorouridine-3'-phosphate
  modified_base 9: mod_base = OTHER; note = 2'-deoxy-2'-fluoroguanosine-3'-phosphate
  modified_base 10: mod_base = OTHER; note = 2'-O-methyladenosine-3'-phosphate
  modified_base 11: mod_base = OTHER; note = 2'-O-methyladenosine-3'-phosphate
  modified_base 12: mod_base = OTHER; note = 2'-O-methyluridine-3'-phosphate
  modified_base 13: mod_base = OTHER; note = 2'-O-methyluridine-3'-phosphate
  modified_base 14: mod_base = OTHER; note = 2'-deoxy-2'-fluorouridine-3'-phosphate
  modified_base 15: mod_base = OTHER; note = 2'-O-methylcytidine-3'-phosphate
  modified_base 16: mod_base = OTHER; note = 2'-deoxy-2'-fluorouridine-3'-phosphate
  modified_base 17: mod_base = OTHER; note = 2'-O-methylguanosine-3'-phosphate
  modified_base 18: mod_base = OTHER; note = 2'-O-methyluridine-3'-phosphate
  modified_base 19: mod_base = OTHER; note = 2'-O-methyladenosine-3'-phosphate
  modified_base 20: mod_base = OTHER; note = 2'-O-methyladenosine-3'-phosphate
  modified_base 21: mod_base = OTHER; note = 2'-O-methyluridine-3'-phosphorothioate
  modified_base 22: mod_base = OTHER; note = 2'-O-methylguanosine-3'-phosphorothioate
  modified_base 23: mod_base = OTHER; note = 2'-O-methylguanosine
agactgttgaatttctgtaatgg

SEQ ID NO: 1340 - RNA, 23 nt, synthetic construct
  source 1..23: mol_type = other RNA
  modified_base 1: mod_base = OTHER; note = 2'-O-methyladenosine-3'-phosphorothioate
  modified_base 2: mod_base = OTHER; note = 2'-deoxy-2'-fluoroguanosine-3'-phosphorothioate
  modified_base 3: mod_base = OTHER; note = 2'-O-methylcytidine-3'-phosphate
  modified_base 4: mod_base = OTHER; note = 2'-O-methyluridine-3'-phosphate
  modified_base 5: mod_base = OTHER; note = 2'-O-methylcytidine-3'-phosphate
  modified_base 6: mod_base = OTHER; note = 2'-deoxy-2'-fluoroadenosine-3'-phosphate
  modified_base 7: mod_base = OTHER; note = 2'-O-methyluridine-3'-phosphate
  modified_base 8: mod_base = OTHER; note = 2'-deoxy-2'-fluoroguanosine-3'-phosphate
  modified_base 9: mod_base = OTHER; note = 2'-deoxy-2'-fluoroadenosine-3'-phosphate
  modified_base 10: mod_base = OTHER; note = 2'-O-methylcytidine-3'-phosphate
  modified_base 11: mod_base = OTHER; note = 2'-O-methyluridine-3'-phosphate
  modified_base 12: mod_base = OTHER; note = 2'-O-methylguanosine-3'-phosphate
  modified_base 13: mod_base = OTHER; note = 2'-O-methyluridine-3'-phosphate
  modified_base 14: mod_base = OTHER; note = 2'-deoxy-2'-fluorouridine-3'-phosphate
  modified_base 15: mod_base = OTHER; note = 2'-O-methylguanosine-3'-phosphate
  modified_base 16: mod_base = OTHER; note = 2'-deoxy-2'-fluoroadenosine-3'-phosphate
  modified_base 17: mod_base = OTHER; note = 2'-O-methyladenosine-3'-phosphate
  modified_base 18: mod_base = OTHER; note = 2'-O-methyluridine-3'-phosphate
  modified_base 19: mod_base = OTHER; note = 2'-O-methyluridine-3'-phosphate
  modified_base 20: mod_base = OTHER; note = 2'-O-methyluridine-3'-phosphate
  modified_base 21: mod_base = OTHER; note = 2'-O-methylcytidine-3'-phosphorothioate
  modified_base 22: mod_base = OTHER; note = 2'-O-methyluridine-3'-phosphorothioate
  modified_base 23: mod_base = OTHER; note = 2'-O-methylguanosine
agctcatgactgttgaatttctg

SEQ ID NO: 1341 - RNA, 23 nt, synthetic construct
  source 1..23: mol_type = other RNA
  modified_base 1: mod_base = OTHER; note = 2'-O-methyladenosine-3'-phosphorothioate
  modified_base 2: mod_base = OTHER; note = 2'-deoxy-2'-fluoroadenosine-3'-phosphorothioate
  modified_base 3: mod_base = OTHER; note = 2'-O-methyluridine-3'-phosphate
  modified_base 4: mod_base = OTHER; note = 2'-O-methyluridine-3'-phosphate
  modified_base 5: mod_base = OTHER; note = 2'-O-methyluridine-3'-phosphate
  modified_base 6: mod_base = OTHER; note = 2'-deoxy-2'-fluorouridine-3'-phosphate
  modified_base 7: mod_base = OTHER; note = 2'-O-methylcytidine-3'-phosphate
  modified_base 8: mod_base = OTHER; note = 2'-deoxy-2'-fluoroadenosine-3'-phosphate
  modified_base 9: mod_base = OTHER; note = 2'-deoxy-2'-fluoroguanosine-3'-phosphate
  modified_base 10: mod_base = OTHER; note = 2'-O-methylcytidine-3'-phosphate
  modified_base 11: mod_base = OTHER; note = 2'-O-methyluridine-3'-phosphate
  modified_base 12: mod_base = OTHER; note = 2'-O-methylcytidine-3'-phosphate
  modified_base 13: mod_base = OTHER; note = 2'-O-methyluridine-3'-phosphate
  modified_base 14: mod_base = OTHER; note = 2'-deoxy-2'-fluoroguanosine-3'-phosphate
  modified_base 15: mod_base = OTHER; note = 2'-O-methylcytidine-3'-phosphate
  modified_base 16: mod_base = OTHER; note = 2'-deoxy-2'-fluorouridine-3'-phosphate
  modified_base 17: mod_base = OTHER; note = 2'-O-methylcytidine-3'-phosphate
  modified_base 18: mod_base = OTHER; note = 2'-O-methyladenosine-3'-phosphate
  modified_base 19: mod_base = OTHER; note = 2'-O-methyluridine-3'-phosphate
  modified_base 20: mod_base = OTHER; note = 2'-O-methylguanosine-3'-phosphate
  modified_base 21: mod_base = OTHER; note = 2'-O-methyladenosine-3'-phosphorothioate
  modified_base 22: mod_base = OTHER; note = 2'-O-methylcytidine-3'-phosphorothioate
  modified_base 23: mod_base = OTHER; note = 2'-O-methyluridine
aattttcagctctgctcatgact

SEQ ID NO: 1342 - RNA, 23 nt, synthetic construct
  source 1..23: mol_type = other RNA
  modified_base 1: mod_base = OTHER; note = 2'-O-methyladenosine-3'-phosphorothioate
  modified_base 2: mod_base = OTHER; note = 2'-deoxy-2'-fluorouridine-3'-phosphorothioate
  modified_base 3: mod_base = OTHER; note = 2'-O-methyluridine-3'-phosphate
  modified_base 4: mod_base = OTHER; note = 2'-O-methyluridine-3'-phosphate
  modified_base 5: mod_base = OTHER; note = 2'-O-methyladenosine-3'-phosphate
  modified_base 6: mod_base = OTHER; note = 2'-deoxy-2'-fluoroadenosine-3'-phosphate
  modified_base 7: mod_base = OTHER; note = 2'-O-methyladenosine-3'-phosphate
  modified_base 8: mod_base = OTHER; note = 2'-deoxy-2'-fluoroadenosine-3'-phosphate
  modified_base 9: mod_base = OTHER; note = 2'-deoxy-2'-fluorouridine-3'-phosphate
  modified_base 10: mod_base = OTHER; note = 2'-O-methyluridine-3'-phosphate
  modified_base 11: mod_base = OTHER; note = 2'-O-methyluridine-3'-phosphate
  modified_base 12: mod_base = OTHER; note = 2'-O-methyluridine-3'-phosphate
  modified_base 13: mod_base = OTHER; note = 2'-O-methylcytidine-3'-phosphate
  modified_base 14: mod_base = OTHER; note = 2'-deoxy-2'-fluoroadenosine-3'-phosphate
  modified_base 15: mod_base = OTHER; note = 2'-O-methylguanosine-3'-phosphate
  modified_base 16: mod_base = OTHER; note = 2'-deoxy-2'-fluorocytidine-3'-phosphate
  modified_base 17: mod_base = OTHER; note = 2'-O-methyluridine-3'-phosphate
  modified_base 18: mod_base = OTHER; note = 2'-O-methylcytidine-3'-phosphate
  modified_base 19: mod_base = OTHER; note = 2'-O-methyluridine-3'-phosphate
  modified_base 20: mod_base = OTHER; note = 2'-O-methylguanosine-3'-phosphate
  modified_base 21: mod_base = OTHER; note = 2'-O-methylcytidine-3'-phosphorothioate
  modified_base 22: mod_base = OTHER; note = 2'-O-methyluridine-3'-phosphorothioate
  modified_base 23: mod_base = OTHER; note = 2'-O-methylcytidine
atttaaaattttcagctctgctc

SEQ ID NO: 1343 - RNA, 23 nt, synthetic construct
  source 1..23: mol_type = other RNA
  modified_base 1: mod_base = OTHER; note = 2'-O-methyladenosine-3'-phosphorothioate
  modified_base 2: mod_base = OTHER; note = 2'-deoxy-2'-fluoroadenosine-3'-phosphorothioate
  modified_base 3: mod_base = OTHER; note = 2'-O-methylguanosine-3'-phosphate
  modified_base 4: mod_base = OTHER; note = 2'-O-methylguanosine-3'-phosphate
  modified_base 5: mod_base = OTHER; note = 2'-O-methyluridine-3'-phosphate
  modified_base 6: mod_base = OTHER; note = 2'-deoxy-2'-fluoroadenosine-3'-phosphate
  modified_base 7: mod_base = OTHER; note = 2'-O-methylcytidine-3'-phosphate
  modified_base 8: mod_base = OTHER; note = 2'-deoxy-2'-fluorouridine-3'-phosphate
  modified_base 9: mod_base = OTHER; note = 2'-deoxy-2'-fluorocytidine-3'-phosphate
  modified_base 10: mod_base = OTHER; note = 2'-O-methyladenosine-3'-phosphate
  modified_base 11: mod_base = OTHER; note = 2'-O-methyladenosine-3'-phosphate
  modified_base 12: mod_base = OTHER; note = 2'-O-methylcytidine-3'-phosphate
  modified_base 13: mod_base = OTHER; note = 2'-O-methyluridine-3'-phosphate
  modified_base 14: mod_base = OTHER; note = 2'-deoxy-2'-fluorouridine-3'-phosphate
  modified_base 15: mod_base = OTHER; note = 2'-O-methylguanosine-3'-phosphate
  modified_base 16: mod_base = OTHER; note = 2'-deoxy-2'-fluorouridine-3'-phosphate
  modified_base 17: mod_base = OTHER; note = 2'-O-methyluridine-3'-phosphate
  modified_base 18: mod_base = OTHER; note = 2'-O-methyluridine-3'-phosphate
  modified_base 19: mod_base = OTHER; note = 2'-O-methyladenosine-3'-phosphate
  modified_base 20: mod_base = OTHER; note = 2'-O-methyladenosine-3'-phosphate
  modified_base 21: mod_base = OTHER; note = 2'-O-methyladenosine-3'-phosphorothioate
  modified_base 22: mod_base = OTHER; note = 2'-O-methyladenosine-3'-phosphorothioate
  modified_base 23: mod_base = OTHER; note = 2'-O-methyluridine
aaggtactcaacttgtttaaaat

SEQ ID NO: 1344 - RNA, 23 nt, synthetic construct
  source 1..23: mol_type = other RNA
  modified_base 1: mod_base = OTHER; note = 2'-O-methyladenosine-3'-phosphorothioate
  modified_base 2: mod_base = OTHER; note = 2'-deoxy-2'-fluoroguanosine-3'-phosphorothioate
  modified_base 3: mod_base = OTHER; note = 2'-O-methyladenosine-3'-phosphate
  modified_base 4: mod_base = OTHER; note = 2'-O-methyladenosine-3'-phosphate
  modified_base 5: mod_base = OTHER; note = 2'-O-methyluridine-3'-phosphate
  modified_base 6: mod_base = OTHER; note = 2'-deoxy-2'-fluoroadenosine-3'-phosphate
  modified_base 7: mod_base = OTHER; note = 2'-O-methyladenosine-3'-phosphate
  modified_base 8: mod_base = OTHER; note = 2'-deoxy-2'-fluoroguanosine-3'-phosphate
  modified_base 9: mod_base = OTHER; note = 2'-deoxy-2'-fluoroguanosine-3'-phosphate
  modified_base 10: mod_base = OTHER; note = 2'-O-methyladenosine-3'-phosphate
  modified_base 11: mod_base = OTHER; note = 2'-O-methylguanosine-3'-phosphate
  modified_base 12: mod_base = OTHER; note = 2'-O-methylguanosine-3'-phosphate
  modified_base 13: mod_base = OTHER; note = 2'-O-methyluridine-3'-phosphate
  modified_base 14: mod_base = OTHER; note = 2'-deoxy-2'-fluoroadenosine-3'-phosphate
  modified_base 15: mod_base = OTHER; note = 2'-O-methylcytidine-3'-phosphate
  modified_base 16: mod_base = OTHER; note = 2'-deoxy-2'-fluorouridine-3'-phosphate
  modified_base 17: mod_base = OTHER; note = 2'-O-methylcytidine-3'-phosphate
  modified_base 18: mod_base = OTHER; note = 2'-O-methyladenosine-3'-phosphate
  modified_base 19: mod_base = OTHER; note = 2'-O-methyladenosine-3'-phosphate
  modified_base 20: mod_base = OTHER; note = 2'-O-methylcytidine-3'-phosphate
  modified_base 21: mod_base = OTHER; note = 2'-O-methyluridine-3'-phosphorothioate
  modified_base 22: mod_base = OTHER; note = 2'-O-methyluridine-3'-phosphorothioate
  modified_base 23: mod_base = OTHER; note = 2'-O-methylguanosine
agaataaggaggtactcaacttg

SEQ ID NO: 1345 - RNA, 23 nt, synthetic construct
  source 1..23: mol_type = other RNA
  modified_base 1: mod_base = OTHER; note = 2'-O-methyladenosine-3'-phosphorothioate
  modified_base 2: mod_base = OTHER; note = 2'-deoxy-2'-fluoroguanosine-3'-phosphorothioate
  modified_base 3: mod_base = OTHER; note = 2'-O-methyluridine-3'-phosphate
  modified_base 4: mod_base = OTHER; note = 2'-O-methyluridine-3'-phosphate
  modified_base 5: mod_base = OTHER; note = 2'-O-methylcytidine-3'-phosphate
  modified_base 6: mod_base = OTHER; note = 2'-deoxy-2'-fluorocytidine-3'-phosphate
  modified_base 7: mod_base = OTHER; note = 2'-O-methyladenosine-3'-phosphate
  modified_base 8: mod_base = OTHER; note = 2'-deoxy-2'-fluorouridine-3'-phosphate
  modified_base 9: mod_base = OTHER; note = 2'-deoxy-2'-fluoroguanosine-3'-phosphate
  modified_base 10: mod_base = OTHER; note = 2'-O-methyladenosine-3'-phosphate
  modified_base 11: mod_base = OTHER; note = 2'-O-methyladenosine-3'-phosphate
  modified_base 12: mod_base = OTHER; note = 2'-O-methyluridine-3'-phosphate
  modified_base 13: mod_base = OTHER; note = 2'-O-methyladenosine-3'-phosphate
  modified_base 14: mod_base = OTHER; note = 2'-deoxy-2'-fluoroadenosine-3'-phosphate
  modified_base 15: mod_base = OTHER; note = 2'-O-methylguanosine-3'-phosphate
  modified_base 16: mod_base = OTHER; note = 2'-deoxy-2'-fluoroguanosine-3'-phosphate
  modified_base 17: mod_base = OTHER; note = 2'-O-methyladenosine-3'-phosphate
  modified_base 18: mod_base = OTHER; note = 2'-O-methylguanosine-3'-phosphate
  modified_base 19: mod_base = OTHER; note = 2'-O-methylguanosine-3'-phosphate
  modified_base 20: mod_base = OTHER; note = 2'-O-methyluridine-3'-phosphate
  modified_base 21: mod_base = OTHER; note = 2'-O-methyladenosine-3'-phosphorothioate
  modified_base 22: mod_base = OTHER; note = 2'-O-methylcytidine-3'-phosphorothioate
  modified_base 23: mod_base = OTHER; note = 2'-O-methyluridine
agttccatgaataaggaggtact

SEQ ID NO: 1346 - RNA, 23 nt, synthetic construct
  source 1..23: mol_type = other RNA
  modified_base 1: mod_base = OTHER; note = 2'-O-methyladenosine-3'-phosphorothioate
  modified_base 2: mod_base = OTHER; note = 2'-deoxy-2'-fluoroadenosine-3'-phosphorothioate
  modified_base 3: mod_base = OTHER; note = 2'-O-methyluridine-3'-phosphate
  modified_base 4: mod_base = OTHER; note = 2'-O-methylcytidine-3'-phosphate
  modified_base 5: mod_base = OTHER; note = 2'-O-methyluridine-3'-phosphate
  modified_base 6: mod_base = OTHER; note = 2'-deoxy-2'-fluoroguanosine-3'-phosphate
  modified_base 7: mod_base = OTHER; note = 2'-O-methylcytidine-3'-phosphate
  modified_base 8: mod_base = OTHER; note = 2'-deoxy-2'-fluorouridine-3'-phosphate
  modified_base 9: mod_base = OTHER; note = 2'-deoxy-2'-fluoroguanosine-3'-phosphate
  modified_base 10: mod_base = OTHER; note = 2'-O-methyluridine-3'-phosphate
  modified_base 11: mod_base = OTHER; note = 2'-O-methyluridine-3'-phosphate
  modified_base 12: mod_base = OTHER; note = 2'-O-methylcytidine-3'-phosphate
  modified_base 13: mod_base = OTHER; note = 2'-O-methylcytidine-3'-phosphate
  modified_base 14: mod_base = OTHER; note = 2'-deoxy-2'-fluoroadenosine-3'-phosphate
  modified_base 15: mod_base = OTHER; note = 2'-O-methyluridine-3'-phosphate
  modified_base 16: mod_base = OTHER; note = 2'-deoxy-2'-fluoroguanosine-3'-phosphate
  modified_base 17: mod_base = OTHER; note = 2'-O-methyladenosine-3'-phosphate
  modified_base 18: mod_base = OTHER; note = 2'-O-methyladenosine-3'-phosphate
  modified_base 19: mod_base = OTHER; note = 2'-O-methyluridine-3'-phosphate
  modified_base 20: mod_base = OTHER; note = 2'-O-methyladenosine-3'-phosphate
  modified_base 21: mod_base = OTHER; note = 2'-O-methyladenosine-3'-phosphorothioate
  modified_base 22: mod_base = OTHER; note = 2'-O-methylguanosine-3'-phosphorothioate
  modified_base 23: mod_base = OTHER; note = 2'-O-methylguanosine
aatctgctgttccatgaataagg

SEQ ID NO: 1347 - RNA, 23 nt, synthetic construct
  source 1..23: mol_type = other RNA
  modified_base 1: mod_base = OTHER; note = 2'-O-methyladenosine-3'-phosphorothioate
  modified_base 2: mod_base = OTHER; note = 2'-deoxy-2'-fluoroadenosine-3'-phosphorothioate
  modified_base 3: mod_base = OTHER; note = 2'-O-methyladenosine-3'-phosphate
  modified_base 4: mod_base = OTHER; note = 2'-O-methylcytidine-3'-phosphate
  modified_base 5: mod_base = OTHER; note = 2'-O-methylguanosine-3'-phosphate
  modified_base 6: mod_base = OTHER; note = 2'-deoxy-2'-fluorouridine-3'-phosphate
  modified_base 7: mod_base = OTHER; note = 2'-O-methyluridine-3'-phosphate
  modified_base 8: mod_base = OTHER; note = 2'-deoxy-2'-fluoroadenosine-3'-phosphate
  modified_base 9: mod_base = OTHER; note = 2'-deoxy-2'-fluorouridine-3'-phosphate
  modified_base 10: mod_base = OTHER; note = 2'-O-methylcytidine-3'-phosphate
  modified_base 11: mod_base = OTHER; note = 2'-O-methyladenosine-3'-phosphate
  modified_base 12: mod_base = OTHER; note = 2'-O-methyluridine-3'-phosphate
  modified_base 13: mod_base = OTHER; note = 2'-O-methylcytidine-3'-phosphate
  modified_base 14: mod_base = OTHER; note = 2'-deoxy-2'-fluorouridine-3'-phosphate
  modified_base 15: mod_base = OTHER; note = 2'-O-methylguanosine-3'-phosphate
  modified_base 16: mod_base = OTHER; note = 2'-deoxy-2'-fluorocytidine-3'-phosphate
  modified_base 17: mod_base = OTHER; note = 2'-O-methyluridine-3'-phosphate
  modified_base 18: mod_base = OTHER; note = 2'-O-methylguanosine-3'-phosphate
  modified_base 19: mod_base = OTHER; note = 2'-O-methyluridine-3'-phosphate
  modified_base 20: mod_base = OTHER; note = 2'-O-methyluridine-3'-phosphate
  modified_base 21: mod_base = OTHER; note = 2'-O-methylcytidine-3'-phosphorothioate
  modified_base 22: mod_base = OTHER; note = 2'-O-methylcytidine-3'-phosphorothioate
  modified_base 23: mod_base = OTHER; note = 2'-O-methyladenosine
aaacgttatcatctgctgttcca

SEQ ID NO: 1348 - RNA, 23 nt, synthetic construct
  source 1..23: mol_type = other RNA
  modified_base 1: mod_base = OTHER; note = 2'-O-methyladenosine-3'-phosphorothioate
  modified_base 2: mod_base = OTHER; note = 2'-deoxy-2'-fluoroadenosine-3'-phosphorothioate
  modified_base 3: mod_base = OTHER; note = 2'-O-methyladenosine-3'-phosphate
  modified_base 4: mod_base = OTHER; note = 2'-O-methyladenosine-3'-phosphate
  modified_base 5: mod_base = OTHER; note = 2'-O-methylguanosine-3'-phosphate
  modified_base 6: mod_base = OTHER; note = 2'-deoxy-2'-fluorouridine-3'-phosphate
  modified_base 7: mod_base = OTHER; note = 2'-O-methylguanosine-3'-phosphate
  modified_base 8: mod_base = OTHER; note = 2'-deoxy-2'-fluoroadenosine-3'-phosphate
  modified_base 9: mod_base = OTHER; note = 2'-deoxy-2'-fluoroadenosine-3'-phosphate
  modified_base 10: mod_base = OTHER; note = 2'-O-methylcytidine-3'-phosphate
  modified_base 11: mod_base = OTHER; note = 2'-O-methylguanosine-3'-phosphate
  modified_base 12: mod_base = OTHER; note = 2'-O-methyluridine-3'-phosphate
  modified_base 13: mod_base = OTHER; note = 2'-O-methyluridine-3'-phosphate
  modified_base 14: mod_base = OTHER; note = 2'-deoxy-2'-fluoroadenosine-3'-phosphate
  modified_base 15: mod_base = OTHER; note = 2'-O-methyluridine-3'-phosphate
  modified_base 16: mod_base = OTHER; note = 2'-deoxy-2'-fluorocytidine-3'-phosphate
  modified_base 17: mod_base = OTHER; note = 2'-O-methyladenosine-3'-phosphate
  modified_base 18: mod_base = OTHER; note = 2'-O-methyluridine-3'-phosphate
  modified_base 19: mod_base = OTHER; note = 2'-O-methylcytidine-3'-phosphate
  modified_base 20: mod_base = OTHER; note = 2'-O-methyluridine-3'-phosphate
  modified_base 21: mod_base = OTHER; note = 2'-O-methylguanosine-3'-phosphorothioate
  modified_base 22: mod_base = OTHER; note = 2'-O-methylcytidine-3'-phosphorothioate
  modified_base 23: mod_base = OTHER; note = 2'-O-methyluridine
aaaagtgaacgttatcatctgct

SEQ ID NO: 1349 - RNA, 23 nt, synthetic construct
  source 1..23: mol_type = other RNA
  modified_base 1: mod_base = OTHER; note = 2'-O-methyladenosine-3'-phosphorothioate
  modified_base 2: mod_base = OTHER; note = 2'-deoxy-2'-fluoroadenosine-3'-phosphorothioate
  modified_base 3: mod_base = OTHER; note = 2'-O-methylcytidine-3'-phosphate
  modified_base 4: mod_base = OTHER; note = 2'-O-methyluridine-3'-phosphate
  modified_base 5: mod_base = OTHER; note = 2'-O-methylguanosine-3'-phosphate
  modified_base 6: mod_base = OTHER; note = 2'-deoxy-2'-fluorocytidine-3'-phosphate
  modified_base 7: mod_base = OTHER; note = 2'-O-methyluridine-3'-phosphate
  modified_base 8: mod_base = OTHER; note = 2'-deoxy-2'-fluoroguanosine-3'-phosphate
  modified_base 9: mod_base = OTHER; note = 2'-deoxy-2'-fluoroadenosine-3'-phosphate
  modified_base 10: mod_base = OTHER; note = 2'-O-methyladenosine-3'-phosphate
  modified_base 11: mod_base = OTHER; note = 2'-O-methyladenosine-3'-phosphate
  modified_base 12: mod_base = OTHER; note = 2'-O-methylguanosine-3'-phosphate
  modified_base 13: mod_base = OTHER; note = 2'-O-methyluridine-3'-phosphate
  modified_base 14: mod_base = OTHER; note = 2'-deoxy-2'-fluoroguanosine-3'-phosphate
  modified_base 15: mod_base = OTHER; note = 2'-O-methyladenosine-3'-phosphate
  modified_base 16: mod_base = OTHER; note = 2'-deoxy-2'-fluoroadenosine-3'-phosphate
  modified_base 17: mod_base = OTHER; note = 2'-O-methylcytidine-3'-phosphate
  modified_base 18: mod_base = OTHER; note = 2'-O-methylguanosine-3'-phosphate
  modified_base 19: mod_base = OTHER; note = 2'-O-methyluridine-3'-phosphate
  modified_base 20: mod_base = OTHER; note = 2'-O-methyluridine-3'-phosphate
  modified_base 21: mod_base = OTHER; note = 2'-O-methyladenosine-3'-phosphorothioate
  modified_base 22: mod_base = OTHER; note = 2'-O-methyluridine-3'-phosphorothioate
  modified_base 23: mod_base = OTHER; note = 2'-O-methylcytidine
aactgctgaaagtgaacgttatc

SEQ ID NO: 1350 - RNA, 23 nt, synthetic construct
  source 1..23: mol_type = other RNA
  modified_base 1: mod_base = OTHER; note = 2'-O-methyladenosine-3'-phosphorothioate
  modified_base 2: mod_base = OTHER; note = 2'-deoxy-2'-fluoroguanosine-3'-phosphorothioate
  modified_base 3: mod_base = OTHER; note = 2'-O-methyladenosine-3'-phosphate
  modified_base 4: mod_base = OTHER; note = 2'-O-methylguanosine-3'-phosphate
  modified_base 5: mod_base = OTHER; note = 2'-O-methylcytidine-3'-phosphate
  modified_base 6: mod_base = OTHER; note = 2'-deoxy-2'-fluorouridine-3'-phosphate
  modified_base 7: mod_base = OTHER; note = 2'-O-methylguanosine-3'-phosphate
  modified_base 8: mod_base = OTHER; note = 2'-deoxy-2'-fluoroadenosine-3'-phosphate
  modified_base 9: mod_base = OTHER; note = 2'-deoxy-2'-fluorocytidine-3'-phosphate
  modified_base 10: mod_base = OTHER; note = 2'-O-methyluridine-3'-phosphate
  modified_base 11: mod_base = OTHER; note = 2'-O-methylguanosine-3'-phosphate
  modified_base 12: mod_base = OTHER; note = 2'-O-methylcytidine-3'-phosphate
  modified_base 13: mod_base = OTHER; note = 2'-O-methyluridine-3'-phosphate
  modified_base 14: mod_base = OTHER; note = 2'-deoxy-2'-fluoroguanosine-3'-phosphate
  modified_base 15: mod_base = OTHER; note = 2'-O-methyladenosine-3'-phosphate
  modified_base 16: mod_base = OTHER; note = 2'-deoxy-2'-fluoroadenosine-3'-phosphate
  modified_base 17: mod_base = OTHER; note = 2'-O-methyladenosine-3'-phosphate
  modified_base 18: mod_base = OTHER; note = 2'-O-methylguanosine-3'-phosphate
  modified_base 19: mod_base = OTHER; note = 2'-O-methyluridine-3'-phosphate
  modified_base 20: mod_base = OTHER; note = 2'-O-methylguanosine-3'-phosphate
  modified_base 21: mod_base = OTHER; note = 2'-O-methyladenosine-3'-phosphorothioate
  modified_base 22: mod_base = OTHER; note = 2'-O-methyladenosine-3'-phosphorothioate
  modified_base 23: mod_base = OTHER; note = 2'-O-methylcytidine
agagctgactgctgaaagtgaac

SEQ ID NO: 1351 - RNA, 23 nt, synthetic construct
  source 1..23: mol_type = other RNA
  modified_base 1: mod_base = OTHER; note = 2'-O-methyladenosine-3'-phosphorothioate
  modified_base 2: mod_base = OTHER; note = 2'-deoxy-2'-fluorouridine-3'-phosphorothioate
  modified_base 3: mod_base = OTHER; note = 2'-O-methylguanosine-3'-phosphate
  modified_base 4: mod_base = OTHER; note = 2'-O-methylguanosine-3'-phosphate
  modified_base 5: mod_base = OTHER; note = 2'-O-methyladenosine-3'-phosphate
  modified_base 6: mod_base = OTHER; note = 2'-deoxy-2'-fluoroguanosine-3'-phosphate
  modified_base 7: mod_base = OTHER; note = 2'-O-methyladenosine-3'-phosphate
  modified_base 8: mod_base = OTHER; note = 2'-deoxy-2'-fluorouridine-3'-phosphate
  modified_base 9: mod_base = OTHER; note = 2'-deoxy-2'-fluorocytidine-3'-phosphate
  modified_base 10: mod_base = OTHER; note = 2'-O-methyluridine-3'-phosphate
  modified_base 11: mod_base = OTHER; note = 2'-O-methylguanosine-3'-phosphate
  modified_base 12: mod_base = OTHER; note = 2'-O-methyladenosine-3'-phosphate
  modified_base 13: mod_base = OTHER; note = 2'-O-methylguanosine-3'-phosphate
  modified_base 14: mod_base = OTHER; note = 2'-deoxy-2'-fluorocytidine-3'-phosphate
  modified_base 15: mod_base = OTHER; note = 2'-O-methyluridine-3'-phosphate
  modified_base 16: mod_base = OTHER; note = 2'-deoxy-2'-fluoroguanosine-3'-phosphate
  modified_base 17: mod_base = OTHER; note = 2'-O-methyladenosine-3'-phosphate
  modified_base 18: mod_base = OTHER; note = 2'-O-methylcytidine-3'-phosphate
  modified_base 19: mod_base = OTHER; note = 2'-O-methyluridine-3'-phosphate
  modified_base 20: mod_base = OTHER; note = 2'-O-methylguanosine-3'-phosphate
  modified_base 21: mod_base = OTHER; note = 2'-O-methylcytidine-3'-phosphorothioate
  modified_base 22: mod_base = OTHER; note = 2'-O-methyluridine-3'-phosphorothioate
  modified_base 23: mod_base = OTHER; note = 2'-O-methylguanosine
atggagatctgagctgactgctg

SEQ ID NO: 1352 - RNA, 23 nt, synthetic construct
  source 1..23: mol_type = other RNA
  modified_base 1: mod_base = OTHER; note = 2'-O-methyladenosine-3'-phosphorothioate
  modified_base 2: mod_base = OTHER; note = 2'-deoxy-2'-fluoroadenosine-3'-phosphorothioate
  modified_base 3: mod_base = OTHER; note = 2'-O-methylguanosine-3'-phosphate
  modified_base 4: mod_base = OTHER; note = 2'-O-methylguanosine-3'-phosphate
  modified_base 5: mod_base = OTHER; note = 2'-O-methylguanosine-3'-phosphate
  modified_base 6: mod_base = OTHER; note = 2'-deoxy-2'-fluorocytidine-3'-phosphate
  modified_base 7: mod_base = OTHER; note = 2'-O-methyluridine-3'-phosphate
  modified_base 8: mod_base = OTHER; note = 2'-deoxy-2'-fluorouridine-3'-phosphate
  modified_base 9: mod_base = OTHER; note = 2'-deoxy-2'-fluorouridine-3'-phosphate
  modified_base 10: mod_base = OTHER; note = 2'-O-methylguanosine-3'-phosphate
  modified_base 11: mod_base = OTHER; note = 2'-O-methylguanosine-3'-phosphate
  modified_base 12: mod_base = OTHER; note = 2'-O-methyladenosine-3'-phosphate
  modified_base 13: mod_base = OTHER; note = 2'-O-methylguanosine-3'-phosphate
  modified_base 14: mod_base = OTHER; note = 2'-deoxy-2'-fluoroadenosine-3'-phosphate
  modified_base 15: mod_base = OTHER; note = 2'-O-methyluridine-3'-phosphate
  modified_base 16: mod_base = OTHER; note = 2'-deoxy-2'-fluorocytidine-3'-phosphate
  modified_base 17: mod_base = OTHER; note = 2'-O-methyluridine-3'-phosphate
  modified_base 18: mod_base = OTHER; note = 2'-O-methylguanosine-3'-phosphate
  modified_base 19: mod_base = OTHER; note = 2'-O-methyladenosine-3'-phosphate
  modified_base 20: mod_base = OTHER; note = 2'-O-methylguanosine-3'-phosphate
  modified_base 21: mod_base = OTHER; note = 2'-O-methylcytidine-3'-phosphorothioate
  modified_base 22: mod_base = OTHER; note = 2'-O-methyluridine-3'-phosphorothioate
  modified_base 23: mod_base = OTHER; note = 2'-O-methylguanosine
aagggctttggagatctgagctg

SEQ ID NO: 1353 - RNA, 23 nt, synthetic construct
  source 1..23: mol_type = other RNA
  modified_base 1: mod_base = OTHER; note = 2'-O-methyladenosine-3'-phosphorothioate
  modified_base 2: mod_base = OTHER; note = 2'-deoxy-2'-fluoroadenosine-3'-phosphorothioate
  modified_base 3: mod_base = OTHER; note = 2'-O-methyluridine-3'-phosphate
  modified_base 4: mod_base = OTHER; note = 2'-O-methylcytidine-3'-phosphate
  modified_base 5: mod_base = OTHER; note = 2'-O-methylguanosine-3'-phosphate
  modified_base 6: mod_base = OTHER; note = 2'-deoxy-2'-fluoroadenosine-3'-phosphate
  modified_base 7: mod_base = OTHER; note = 2'-O-methylcytidine-3'-phosphate
  modified_base 8: mod_base = OTHER; note = 2'-deoxy-2'-fluorocytidine-3'-phosphate
  modified_base 9: mod_base = OTHER; note = 2'-deoxy-2'-fluoroadenosine-3'-phosphate
  modified_base 10: mod_base = OTHER; note = 2'-O-methylguanosine-3'-phosphate
  modified_base 11: mod_base = OTHER; note = 2'-O-methylguanosine-3'-phosphate
  modified_base 12: mod_base = OTHER; note = 2'-O-methylguanosine-3'-phosphate
  modified_base 13: mod_base = OTHER; note = 2'-O-methylcytidine-3'-phosphate
  modified_base 14: mod_base = OTHER; note = 2'-deoxy-2'-fluorouridine-3'-phosphate
  modified_base 15: mod_base = OTHER; note = 2'-O-methyluridine-3'-phosphate
  modified_base 16: mod_base = OTHER; note = 2'-deoxy-2'-fluorouridine-3'-phosphate
  modified_base 17: mod_base = OTHER; note = 2'-O-methylguanosine-3'-phosphate
  modified_base 18: mod_base = OTHER; note = 2'-O-methylguanosine-3'-phosphate
  modified_base 19: mod_base = OTHER; note = 2'-O-methyladenosine-3'-phosphate
  modified_base 20: mod_base = OTHER; note = 2'-O-methylguanosine-3'-phosphate
  modified_base 21: mod_base = OTHER; note = 2'-O-methyladenosine-3'-phosphorothioate
  modified_base 22: mod_base = OTHER; note = 2'-O-methyluridine-3'-phosphorothioate
  modified_base 23: mod_base = OTHER; note = 2'-O-methylcytidine
aatcgaccagggctttggagatc

SEQ ID NO: 1354 - RNA, 23 nt, synthetic construct
  source 1..23: mol_type = other RNA
  modified_base 1: mod_base = OTHER; note = 2'-O-methyladenosine-3'-phosphorothioate
  modified_base 2: mod_base = OTHER; note = 2'-deoxy-2'-fluoroadenosine-3'-phosphorothioate
  modified_base 3: mod_base = OTHER; note = 2'-O-methylcytidine-3'-phosphate
  modified_base 4: mod_base = OTHER; note = 2'-O-methyluridine-3'-phosphate
  modified_base 5: mod_base = OTHER; note = 2'-O-methylcytidine-3'-phosphate
  modified_base 6: mod_base = OTHER; note = 2'-deoxy-2'-fluorocytidine-3'-phosphate
  modified_base 7: mod_base = OTHER; note = 2'-O-methyladenosine-3'-phosphate
  modified_base 8: mod_base = OTHER; note = 2'-deoxy-2'-fluoroadenosine-3'-phosphate
  modified_base 9: mod_base = OTHER; note = 2'-deoxy-2'-fluorocytidine-3'-phosphate
  modified_base 10: mod_base = OTHER; note = 2'-O-methyladenosine-3'-phosphate
  modified_base 11: mod_base = OTHER; note = 2'-O-methyluridine-3'-phosphate
  modified_base 12: mod_base = OTHER; note = 2'-O-methylcytidine-3'-phosphate
  modified_base 13: mod_base = OTHER; note = 2'-O-methylguanosine-3'-phosphate
  modified_base 14: mod_base = OTHER; note = 2'-deoxy-2'-fluoroadenosine-3'-phosphate
  modified_base 15: mod_base = OTHER; note = 2'-O-methylcytidine-3'-phosphate
  modified_base 16: mod_base = OTHER; note = 2'-deoxy-2'-fluorocytidine-3'-phosphate
  modified_base 17: mod_base = OTHER; note = 2'-O-methyladenosine-3'-phosphate
  modified_base 18: mod_base = OTHER; note = 2'-O-methylguanosine-3'-phosphate
  modified_base 19: mod_base = OTHER; note = 2'-O-methylguanosine-3'-phosphate
  modified_base 20: mod_base = OTHER; note = 2'-O-methylguanosine-3'-phosphate
  modified_base 21: mod_base = OTHER; note = 2'-O-methylcytidine-3'-phosphorothioate
  modified_base 22: mod_base = OTHER; note = 2'-O-methyluridine-3'-phosphorothioate
  modified_base 23: mod_base = OTHER; note = 2'-O-methyluridine
aactccaacatcgaccagggctt

SEQ ID NO: 1355 - RNA, 23 nt, synthetic construct
  source 1..23: mol_type = other RNA
  modified_base 1: mod_base = OTHER; note = 2'-O-methyladenosine-3'-phosphorothioate
  modified_base 2: mod_base = OTHER; note = 2'-deoxy-2'-fluoroadenosine-3'-phosphorothioate
  modified_base 3: mod_base = OTHER; note = 2'-O-methyladenosine-3'-phosphate
  modified_base 4: mod_base = OTHER; note = 2'-O-methyladenosine-3'-phosphate
  modified_base 5: mod_base = OTHER; note = 2'-O-methyluridine-3'-phosphate
  modified_base 6: mod_base = OTHER; note = 2'-deoxy-2'-fluorocytidine-3'-phosphate
  modified_base 7: mod_base = OTHER; note = 2'-O-methylcytidine-3'-phosphate
  modified_base 8: mod_base = OTHER; note = 2'-deoxy-2'-fluoroadenosine-3'-phosphate
  modified_base 9: mod_base = OTHER; note = 2'-deoxy-2'-fluorocytidine-3'-phosphate
  modified_base 10: mod_base = OTHER; note = 2'-O-methyluridine-3'-phosphate
  modified_base 11: mod_base = OTHER; note = 2'-O-methylcytidine-3'-phosphate
  modified_base 12: mod_base = OTHER; note = 2'-O-methylcytidine-3'-phosphate
  modified_base 13: mod_base = OTHER; note = 2'-O-methyladenosine-3'-phosphate
  modified_base 14: mod_base = OTHER; note = 2'-deoxy-2'-fluoroadenosine-3'-phosphate
  modified_base 15: mod_base = OTHER; note = 2'-O-methylcytidine-3'-phosphate
  modified_base 16: mod_base = OTHER; note = 2'-deoxy-2'-fluoroadenosine-3'-phosphate
  modified_base 17: mod_base = OTHER; note = 2'-O-methyluridine-3'-phosphate
  modified_base 18: mod_base = OTHER; note = 2'-O-methylcytidine-3'-phosphate
  modified_base 19: mod_base = OTHER; note = 2'-O-methylguanosine-3'-phosphate
  modified_base 20: mod_base = OTHER; note = 2'-O-methyladenosine-3'-phosphate
  modified_base 21: mod_base = OTHER; note = 2'-O-methylcytidine-3'-phosphorothioate
  modified_base 22: mod_base = OTHER; note = 2'-O-methylcytidine-3'-phosphorothioate
  modified_base 23: mod_base = OTHER; note = 2'-O-methyladenosine
aaaatccactccaacatcgacca

SEQ ID NO: 1356 - RNA, 23 nt, synthetic construct
  source 1..23: mol_type = other RNA
  modified_base 1: mod_base = OTHER; note = 2'-O-methyladenosine-3'-phosphorothioate
  modified_base 2: mod_base = OTHER; note = 2'-deoxy-2'-fluoroadenosine-3'-phosphorothioate
  modified_base 3: mod_base = OTHER; note = 2'-O-methylcytidine-3'-phosphate
  modified_base 4: mod_base = OTHER; note = 2'-O-methyladenosine-3'-phosphate
  modified_base 5: mod_base = OTHER; note = 2'-O-methyluridine-3'-phosphate
  modified_base 6: mod_base = OTHER; note = 2'-deoxy-2'-fluorouridine-3'-phosphate
  modified_base 7: mod_base = OTHER; note = 2'-O-methylguanosine-3'-phosphate
  modified_base 8: mod_base = OTHER; note = 2'-deoxy-2'-fluorocytidine-3'-phosphate
  modified_base 9: mod_base = OTHER; note = 2'-deoxy-2'-fluorocytidine-3'-phosphate
  modified_base 10: mod_base = OTHER; note = 2'-O-methyluridine-3'-phosphate
  modified_base 11: mod_base = OTHER; note = 2'-O-methylguanosine-3'-phosphate
  modified_base 12: mod_base = OTHER; note = 2'-O-methylguanosine-3'-phosphate
  modified_base 13: mod_base = OTHER; note = 2'-O-methyladenosine-3'-phosphate
  modified_base 14: mod_base = OTHER; note = 2'-deoxy-2'-fluoroadenosine-3'-phosphate
  modified_base 15: mod_base = OTHER; note = 2'-O-methyladenosine-3'-phosphate
  modified_base 16: mod_base = OTHER; note = 2'-deoxy-2'-fluorouridine-3'-phosphate
  modified_base 17: mod_base = OTHER; note = 2'-O-methylcytidine-3'-phosphate
  modified_base 18: mod_base = OTHER; note = 2'-O-methylcytidine-3'-phosphate
  modified_base 19: mod_base = OTHER; note = 2'-O-methyladenosine-3'-phosphate
  modified_base 20: mod_base = OTHER; note = 2'-O-methylcytidine-3'-phosphate
  modified_base 21: mod_base = OTHER; note = 2'-O-methyluridine-3'-phosphorothioate
  modified_base 22: mod_base = OTHER; note = 2'-O-methylcytidine-3'-phosphorothioate
  modified_base 23: mod_base = OTHER; note = 2'-O-methylcytidine
aacattgcctggaaatccactcc

SEQ ID NO: 1357 - RNA, 23 nt, synthetic construct
  source 1..23: mol_type = other RNA
  modified_base 1: mod_base = OTHER; note = 2'-O-methyladenosine-3'-phosphorothioate
  modified_base 2: mod_base = OTHER; note = 2'-deoxy-2'-fluoroadenosine-3'-phosphorothioate
  modified_base 3: mod_base = OTHER; note = 2'-O-methylguanosine-3'-phosphate
  modified_base 4: mod_base = OTHER; note = 2'-O-methyluridine-3'-phosphate
  modified_base 5: mod_base = OTHER; note = 2'-O-methyladenosine-3'-phosphate
  modified_base 6: mod_base = OTHER; note = 2'-deoxy-2'-fluorouridine-3'-phosphate
  modified_base 7: mod_base = OTHER; note = 2'-O-methyladenosine-3'-phosphate
  modified_base 8: mod_base = OTHER; note = 2'-deoxy-2'-fluorocytidine-3'-phosphate
  modified_base 9: mod_base = OTHER; note = 2'-deoxy-2'-fluorocytidine-3'-phosphate
  modified_base 10: mod_base = OTHER; note = 2'-O-methyladenosine-3'-phosphate
  modified_base 11: mod_base = OTHER; note = 2'-O-methylcytidine-3'-phosphate
  modified_base 12: mod_base = OTHER; note = 2'-O-methyladenosine-3'-phosphate
  modified_base 13: mod_base = OTHER; note = 2'-O-methyluridine-3'-phosphate
  modified_base 14: mod_base = OTHER; note = 2'-deoxy-2'-fluorouridine-3'-phosphate
  modified_base 15: mod_base = OTHER; note = 2'-O-methylguanosine-3'-phosphate
  modified_base 16: mod_base = OTHER; note = 2'-deoxy-2'-fluorocytidine-3'-phosphate
  modified_base 17: mod_base = OTHER; note = 2'-O-methylcytidine-3'-phosphate
  modified_base 18: mod_base = OTHER; note = 2'-O-methyluridine-3'-phosphate
  modified_base 19: mod_base = OTHER; note = 2'-O-methylguanosine-3'-phosphate
  modified_base 20: mod_base = OTHER; note = 2'-O-methylguanosine-3'-phosphate
  modified_base 21: mod_base = OTHER; note = 2'-O-methyladenosine-3'-phosphorothioate
  modified_base 22: mod_base = OTHER; note = 2'-O-methyladenosine-3'-phosphorothioate
  modified_base 23: mod_base = OTHER; note = 2'-O-methyladenosine
aagtataccacattgcctggaaa

SEQ ID NO: 1358 - RNA, 23 nt, synthetic construct
  source 1..23: mol_type = other RNA
  modified_base 1: mod_base = OTHER; note = 2'-O-methyladenosine-3'-phosphorothioate
  modified_base 2: mod_base = OTHER; note = 2'-deoxy-2'-fluorocytidine-3'-phosphorothioate
  modified_base 3: mod_base = OTHER; note = 2'-O-methyluridine-3'-phosphate
  modified_base 4: mod_base = OTHER; note = 2'-O-methyluridine-3'-phosphate
  modified_base 5: mod_base = OTHER; note = 2'-O-methylcytidine-3'-phosphate
  modified_base 6: mod_base = OTHER; note = 2'-deoxy-2'-fluoroadenosine-3'-phosphate
  modified_base 7: mod_base = OTHER; note = 2'-O-methyluridine-3'-phosphate
  modified_base 8: mod_base = OTHER; note = 2'-deoxy-2'-fluorocytidine-3'-phosphate
  modified_base 9: mod_base = OTHER; note = 2'-deoxy-2'-fluoroadenosine-3'-phosphate
  modified_base 10: mod_base = OTHER; note = 2'-O-methylguanosine-3'-phosphate
  modified_base 11: mod_base = OTHER; note = 2'-O-methyluridine-3'-phosphate
  modified_base 12: mod_base = OTHER; note = 2'-O-methyladenosine-3'-phosphate
  modified_base 13: mod_base = OTHER; note = 2'-O-methyluridine-3'-phosphate
  modified_base 14: mod_base = OTHER; note = 2'-deoxy-2'-fluoroadenosine-3'-phosphate
  modified_base 15: mod_base = OTHER; note = 2'-O-methylcytidine-3'-phosphate
  modified_base 16: mod_base = OTHER; note = 2'-deoxy-2'-fluorocytidine-3'-phosphate
  modified_base 17: mod_base = OTHER; note = 2'-O-methyladenosine-3'-phosphate
  modified_base 18: mod_base = OTHER; note = 2'-O-methylcytidine-3'-phosphate
  modified_base 19: mod_base = OTHER; note = 2'-O-methyladenosine-3'-phosphate
  modified_base 20: mod_base = OTHER; note = 2'-O-methyluridine-3'-phosphate
  modified_base 21: mod_base = OTHER; note = 2'-O-methyluridine-3'-phosphorothioate
  modified_base 22: mod_base = OTHER; note = 2'-O-methylguanosine-3'-phosphorothioate
  modified_base 23: mod_base = OTHER; note = 2'-O-methylcytidine
acttcatcagtataccacattgc

SEQ ID NO: 1359 - RNA, 23 nt, synthetic construct
  source 1..23: mol_type = other RNA
  modified_base 1: mod_base = OTHER; note = 2'-O-methyladenosine-3'-phosphorothioate
  modified_base 2: mod_base = OTHER; note = 2'-deoxy-2'-fluorocytidine-3'-phosphorothioate
  modified_base 3: mod_base = OTHER; note = 2'-O-methyladenosine-3'-phosphate
  modified_base 4: mod_base = OTHER; note = 2'-O-methyluridine-3'-phosphate
  modified_base 5: mod_base = OTHER; note = 2'-O-methylguanosine-3'-phosphate
  modified_base 6: mod_base = OTHER; note = 2'-deoxy-2'-fluoroguanosine-3'-phosphate
  modified_base 7: mod_base = OTHER; note = 2'-O-methyluridine-3'-phosphate
  modified_base 8: mod_base = OTHER; note = 2'-deoxy-2'-fluorocytidine-3'-phosphate
  modified_base 9: mod_base = OTHER; note = 2'-deoxy-2'-fluorouridine-3'-phosphate
  modified_base 10: mod_base = OTHER; note = 2'-O-methyluridine-3'-phosphate
  modified_base 11: mod_base = OTHER; note = 2'-O-methylcytidine-3'-phosphate
  modified_base 12: mod_base = OTHER; note = 2'-O-methyladenosine-3'-phosphate
  modified_base 13: mod_base = OTHER; note = 2'-O-methyluridine-3'-phosphate
  modified_base 14: mod_base = OTHER; note = 2'-deoxy-2'-fluorocytidine-3'-phosphate
  modified_base 15: mod_base = OTHER; note = 2'-O-methyladenosine-3'-phosphate
  modified_base 16: mod_base = OTHER; note = 2'-deoxy-2'-fluoroguanosine-3'-phosphate
  modified_base 17: mod_base = OTHER; note = 2'-O-methyluridine-3'-phosphate
  modified_base 18: mod_base = OTHER; note = 2'-O-methyladenosine-3'-phosphate
  modified_base 19: mod_base = OTHER; note = 2'-O-methyluridine-3'-phosphate
  modified_base 20: mod_base = OTHER; note = 2'-O-methyladenosine-3'-phosphate
  modified_base 21: mod_base = OTHER; note = 2'-O-methylcytidine-3'-phosphorothioate
  modified_base 22: mod_base = OTHER; note = 2'-O-methylcytidine-3'-phosphorothioate
  modified_base 23: mod_base = OTHER; note = 2'-O-methyladenosine
acatggtcttcatcagtatacca

SEQ ID NO: 1360 - RNA, 23 nt, synthetic construct
  source 1..23: mol_type = other RNA
  modified_base 1: mod_base = OTHER; note = 2'-O-methyladenosine-3'-phosphorothioate
  modified_base 2: mod_base = OTHER; note = 2'-deoxy-2'-fluoroadenosine-3'-phosphorothioate
  modified_base 3: mod_base = OTHER; note = 2'-O-methylguanosine-3'-phosphate
  modified_base 4: mod_base = OTHER; note = 2'-O-methylcytidine-3'-phosphate
  modified_base 5: mod_base = OTHER; note = 2'-O-methyluridine-3'-phosphate
  modified_base 6: mod_base = OTHER; note = 2'-deoxy-2'-fluoroadenosine-3'-phosphate
  modified_base 7: mod_base = OTHER; note = 2'-O-methyluridine-3'-phosphate
  modified_base 8: mod_base = OTHER; note = 2'-deoxy-2'-fluorouridine-3'-phosphate
  modified_base 9: mod_base = OTHER; note = 2'-deoxy-2'-fluorocytidine-3'-phosphate
  modified_base 10: mod_base = OTHER; note = 2'-O-methylcytidine-3'-phosphate
  modified_base 11: mod_base = OTHER; note = 2'-O-methyladenosine-3'-phosphate
  modified_base 12: mod_base = OTHER; note = 2'-O-methyluridine-3'-phosphate
  modified_base 13: mod_base = OTHER; note = 2'-O-methylguanosine-3'-phosphate
  modified_base 14: mod_base = OTHER; note = 2'-deoxy-2'-fluoroguanosine-3'-phosphate
  modified_base 15: mod_base = OTHER; note = 2'-O-methyluridine-3'-phosphate
  modified_base 16: mod_base = OTHER; note = 2'-deoxy-2'-fluorocytidine-3'-phosphate
  modified_base 17: mod_base = OTHER; note = 2'-O-methyluridine-3'-phosphate
  modified_base 18: mod_base = OTHER; note = 2'-O-methyluridine-3'-phosphate
  modified_base 19: mod_base = OTHER; note = 2'-O-methylcytidine-3'-phosphate
  modified_base 20: mod_base = OTHER; note = 2'-O-methyladenosine-3'-phosphate
  modified_base 21: mod_base = OTHER; note = 2'-O-methyluridine-3'-phosphorothioate
  modified_base 22: mod_base = OTHER; note = 2'-O-methylcytidine-3'-phosphorothioate
  modified_base 23: mod_base = OTHER; note = 2'-O-methyladenosine
aagctattccatggtcttcatca

SEQ ID NO: 1361 - RNA, 23 nt, synthetic construct
  source 1..23: mol_type = other RNA
  modified_base 1: mod_base = OTHER; note = 2'-O-methyladenosine-3'-phosphorothioate
  modified_base 2: mod_base = OTHER; note = 2'-deoxy-2'-fluorouridine-3'-phosphorothioate
  modified_base 3: mod_base = OTHER; note = 2'-O-methylguanosine-3'-phosphate
  modified_base 4: mod_base = OTHER; note = 2'-O-methylcytidine-3'-phosphate
  modified_base 5: mod_base = OTHER; note = 2'-O-methyluridine-3'-phosphate
  modified_base 6: mod_base = OTHER; note = 2'-deoxy-2'-fluoroguanosine-3'-phosphate
  modified_base 7: mod_base = OTHER; note = 2'-O-methylcytidine-3'-phosphate
  modified_base 8: mod_base = OTHER; note = 2'-deoxy-2'-fluorouridine-3'-phosphate
  modified_base 9: mod_base = OTHER; note = 2'-deoxy-2'-fluoroadenosine-3'-phosphate
  modified_base 10: mod_base = OTHER; note = 2'-O-methylguanosine-3'-phosphate
  modified_base 11: mod_base = OTHER; note = 2'-O-methylcytidine-3'-phosphate
  modified_base 12: mod_base = OTHER; note = 2'-O-methyluridine-3'-phosphate
  modified_base 13: mod_base = OTHER; note = 2'-O-methyladenosine-3'-phosphate
  modified_base 14: mod_base = OTHER; note = 2'-deoxy-2'-fluorouridine-3'-phosphate
  modified_base 15: mod_base = OTHER; note = 2'-O-methyluridine-3'-phosphate
  modified_base 16: mod_base = OTHER; note = 2'-deoxy-2'-fluorocytidine-3'-phosphate
  modified_base 17: mod_base = OTHER; note = 2'-O-methylcytidine-3'-phosphate
  modified_base 18: mod_base = OTHER; note = 2'-O-methyladenosine-3'-phosphate
  modified_base 19: mod_base = OTHER; note = 2'-O-methyluridine-3'-phosphate
  modified_base 20: mod_base = OTHER; note = 2'-O-methylguanosine-3'-phosphate
  modified_base 21: mod_base = OTHER; note = 2'-O-methylguanosine-3'-phosphorothioate
  modified_base 22: mod_base = OTHER; note = 2'-O-methyluridine-3'-phosphorothioate
  modified_base 23: mod_base = OTHER; note = 2'-O-methylcytidine
atgctgctagctattccatggtc

SEQ ID NO: 1362 - RNA, 23 nt, synthetic construct
  source 1..23: mol_type = other RNA
  modified_base 1: mod_base = OTHER; note = 2'-O-methyladenosine-3'-phosphorothioate
  modified_base 2: mod_base = OTHER; note = 2'-deoxy-2'-fluorouridine-3'-phosphorothioate
  modified_base 3: mod_base = OTHER; note = 2'-O-methylguanosine-3'-phosphate
  modified_base 4: mod_base = OTHER; note = 2'-O-methyluridine-3'-phosphate
  modified_base 5: mod_base = OTHER; note = 2'-O-methylguanosine-3'-phosphate
  modified_base 6: mod_base = OTHER; note = 2'-deoxy-2'-fluorocytidine-3'-phosphate
  modified_base 7: mod_base = OTHER; note = 2'-O-methyluridine-3'-phosphate
  modified_base 8: mod_base = OTHER; note = 2'-deoxy-2'-fluoroguanosine-3'-phosphate
  modified_base 9: mod_base = OTHER; note = 2'-deoxy-2'-fluorouridine-3'-phosphate
  modified_base 10: mod_base = OTHER; note = 2'-O-methylguanosine-3'-phosphate
  modified_base 11: mod_base = OTHER; note = 2'-O-methylcytidine-3'-phosphate
  modified_base 12: mod_base = OTHER; note = 2'-O-methyluridine-3'-phosphate
  modified_base 13: mod_base = OTHER; note = 2'-O-methylguanosine-3'-phosphate
  modified_base 14: mod_base = OTHER; note = 2'-deoxy-2'-fluorocytidine-3'-phosphate
  modified_base 15: mod_base = OTHER; note = 2'-O-methyluridine-3'-phosphate
  modified_base 16: mod_base = OTHER; note = 2'-deoxy-2'-fluoroadenosine-3'-phosphate
  modified_base 17: mod_base = OTHER; note = 2'-O-methylguanosine-3'-phosphate
  modified_base 18: mod_base = OTHER; note = 2'-O-methylcytidine-3'-phosphate
  modified_base 19: mod_base = OTHER; note = 2'-O-methyluridine-3'-phosphate
  modified_base 20: mod_base = OTHER; note = 2'-O-methyladenosine-3'-phosphate
  modified_base 21: mod_base = OTHER; note = 2'-O-methyluridine-3'-phosphorothioate
  modified_base 22: mod_base = OTHER; note = 2'-O-methyluridine-3'-phosphorothioate
  modified_base 23: mod_base = OTHER; note = 2'-O-methylcytidine
atgtgctgtgctgctagctattc

SEQ ID NO: 1363 - RNA, 23 nt, synthetic construct
  source 1..23: mol_type = other RNA
  modified_base 1: mod_base = OTHER; note = 2'-O-methyladenosine-3'-phosphorothioate
  modified_base 2: mod_base = OTHER; note = 2'-deoxy-2'-fluorouridine-3'-phosphorothioate
  modified_base 3: mod_base = OTHER; note = 2'-O-methyladenosine-3'-phosphate
  modified_base 4: mod_base = OTHER; note = 2'-O-methyluridine-3'-phosphate
  modified_base 5: mod_base = OTHER; note = 2'-O-methylguanosine-3'-phosphate
  modified_base 6: mod_base = OTHER; note = 2'-deoxy-2'-fluorouridine-3'-phosphate
  modified_base 7: mod_base = OTHER; note = 2'-O-methyluridine-3'-phosphate
  modified_base 8: mod_base = OTHER; note = 2'-deoxy-2'-fluoroguanosine-3'-phosphate
  modified_base 9: mod_base = OTHER; note = 2'-deoxy-2'-fluoroguanosine-3'-phosphate
  modified_base 10: mod_base = OTHER; note = 2'-O-methyluridine-3'-phosphate
  modified_base 11: mod_base = OTHER; note = 2'-O-methylguanosine-3'-phosphate
  modified_base 12: mod_base = OTHER; note = 2'-O-methyluridine-3'-phosphate
  modified_base 13: mod_base = OTHER; note = 2'-O-methylguanosine-3'-phosphate
  modified_base 14: mod_base = OTHER; note = 2'-deoxy-2'-fluorocytidine-3'-phosphate
  modified_base 15: mod_base = OTHER; note = 2'-O-methyluridine-3'-phosphate
  modified_base 16: mod_base = OTHER; note = 2'-deoxy-2'-fluoroguanosine-3'-phosphate
  modified_base 17: mod_base = OTHER; note = 2'-O-methyluridine-3'-phosphate
  modified_base 18: mod_base = OTHER; note = 2'-O-methylguanosine-3'-phosphate
  modified_base 19: mod_base = OTHER; note = 2'-O-methylcytidine-3'-phosphate
  modified_base 20: mod_base = OTHER; note = 2'-O-methyluridine-3'-phosphate
  modified_base 21: mod_base = OTHER; note = 2'-O-methylguanosine-3'-phosphorothioate
  modified_base 22: mod_base = OTHER; note = 2'-O-methylcytidine-3'-phosphorothioate
  modified_base 23: mod_base = OTHER; note = 2'-O-methyluridine
atatgttggtgtgctgtgctgct

SEQ ID NO: 1364 - RNA, 23 nt, synthetic construct
  source 1..23: mol_type = other RNA
  modified_base 1: mod_base = OTHER; note = 2'-O-methyladenosine-3'-phosphorothioate
  modified_base 2: mod_base = OTHER; note = 2'-deoxy-2'-fluorouridine-3'-phosphorothioate
  modified_base 3: mod_base = OTHER; note = 2'-O-methyladenosine-3'-phosphate
  modified_base 4: mod_base = OTHER; note = 2'-O-methyluridine-3'-phosphate
  modified_base 5: mod_base = OTHER; note = 2'-O-methyladenosine-3'-phosphate
  modified_base 6: mod_base = OTHER; note = 2'-deoxy-2'-fluorouridine-3'-phosphate
  modified_base 7: mod_base = OTHER; note = 2'-O-methyladenosine-3'-phosphate
  modified_base 8: mod_base = OTHER; note = 2'-deoxy-2'-fluorouridine-3'-phosphate
  modified_base 9: mod_base = OTHER; note = 2'-deoxy-2'-fluoroadenosine-3'-phosphate
  modified_base 10: mod_base = OTHER; note = 2'-O-methyluridine-3'-phosphate
  modified_base 11: mod_base = OTHER; note = 2'-O-methylguanosine-3'-phosphate
  modified_base 12: mod_base = OTHER; note = 2'-O-methyluridine-3'-phosphate
  modified_base 13: mod_base = OTHER; note = 2'-O-methyluridine-3'-phosphate
  modified_base 14: mod_base = OTHER; note = 2'-deoxy-2'-fluoroguanosine-3'-phosphate
  modified_base 15: mod_base = OTHER; note = 2'-O-methylguanosine-3'-phosphate
  modified_base 16: mod_base = OTHER; note = 2'-deoxy-2'-fluorouridine-3'-phosphate
  modified_base 17: mod_base = OTHER; note = 2'-O-methylguanosine-3'-phosphate
  modified_base 18: mod_base = OTHER; note = 2'-O-methyluridine-3'-phosphate
  modified_base 19: mod_base = OTHER; note = 2'-O-methylguanosine-3'-phosphate
  modified_base 20: mod_base = OTHER; note = 2'-O-methylcytidine-3'-phosphate
  modified_base 21: mod_base = OTHER; note = 2'-O-methyluridine-3'-phosphorothioate
  modified_base 22: mod_base = OTHER; note = 2'-O-methylguanosine-3'-phosphorothioate
  modified_base 23: mod_base = OTHER; note = 2'-O-methyluridine
atatatatatgttggtgtgctgt

SEQ ID NO: 1365 - RNA, 23 nt, synthetic construct
  source 1..23: mol_type = other RNA
  modified_base 1: mod_base = OTHER; note = 2'-O-methyladenosine-3'-phosphorothioate
  modified_base 2: mod_base = OTHER; note = 2'-deoxy-2'-fluorouridine-3'-phosphorothioate
  modified_base 3: mod_base = OTHER; note = 2'-O-methylguanosine-3'-phosphate
  modified_base 4: mod_base = OTHER; note = 2'-O-methyluridine-3'-phosphate
  modified_base 5: mod_base = OTHER; note = 2'-O-methylguanosine-3'-phosphate
  modified_base 6: mod_base = OTHER; note = 2'-deoxy-2'-fluoroguanosine-3'-phosphate
  modified_base 7: mod_base = OTHER; note = 2'-O-methylguanosine-3'-phosphate
  modified_base 8: mod_base = OTHER; note = 2'-deoxy-2'-fluorouridine-3'-phosphate
  modified_base 9: mod_base = OTHER; note = 2'-deoxy-2'-fluoroadenosine-3'-phosphate
  modified_base 10: mod_base = OTHER; note = 2'-O-methyluridine-3'-phosphate
  modified_base 11: mod_base = OTHER; note = 2'-O-methyladenosine-3'-phosphate
  modified_base 12: mod_base = OTHER; note = 2'-O-methyluridine-3'-phosphate
  modified_base 13: mod_base = OTHER; note = 2'-O-methyladenosine-3'-phosphate
  modified_base 14: mod_base = OTHER; note = 2'-deoxy-2'-fluorouridine-3'-phosphate
  modified_base 15: mod_base = OTHER; note = 2'-O-methyladenosine-3'-phosphate
  modified_base 16: mod_base = OTHER; note = 2'-deoxy-2'-fluorouridine-3'-phosphate
  modified_base 17: mod_base = OTHER; note = 2'-O-methylguanosine-3'-phosphate
  modified_base 18: mod_base = OTHER; note = 2'-O-methyluridine-3'-phosphate
  modified_base 19: mod_base = OTHER; note = 2'-O-methyluridine-3'-phosphate
  modified_base 20: mod_base = OTHER; note = 2'-O-methylguanosine-3'-phosphate
  modified_base 21: mod_base = OTHER; note = 2'-O-methylguanosine-3'-phosphorothioate
  modified_base 22: mod_base = OTHER; note = 2'-O-methyluridine-3'-phosphorothioate
  modified_base 23: mod_base = OTHER; note = 2'-O-methylguanosine
atgtgggtatatatatgttggtg

SEQ ID NO: 1366 - RNA, 23 nt, synthetic construct
  source 1..23: mol_type = other RNA
  modified_base 1: mod_base = OTHER; note = 2'-O-methyladenosine-3'-phosphorothioate
  modified_base 2: mod_base = OTHER; note = 2'-deoxy-2'-fluorouridine-3'-phosphorothioate
  modified_base 3: mod_base = OTHER; note = 2'-O-methylguanosine-3'-phosphate
  modified_base 4: mod_base = OTHER; note = 2'-O-methyladenosine-3'-phosphate
  modified_base 5: mod_base = OTHER; note = 2'-O-methyladenosine-3'-phosphate
  modified_base 6: mod_base = OTHER; note = 2'-deoxy-2'-fluoroguanosine-3'-phosphate
  modified_base 7: mod_base = OTHER; note = 2'-O-methyluridine-3'-phosphate
  modified_base 8: mod_base = OTHER; note = 2'-deoxy-2'-fluoroguanosine-3'-phosphate
  modified_base 9: mod_base = OTHER; note = 2'-deoxy-2'-fluoroguanosine-3'-phosphate
  modified_base 10: mod_base = OTHER; note = 2'-O-methylcytidine-3'-phosphate
  modified_base 11: mod_base = OTHER; note = 2'-O-methyluridine-3'-phosphate
  modified_base 12: mod_base = OTHER; note = 2'-O-methylcytidine-3'-phosphate
  modified_base 13: mod_base = OTHER; note = 2'-O-methyladenosine-3'-phosphate
  modified_base 14: mod_base = OTHER; note = 2'-deoxy-2'-fluorouridine-3'-phosphate
  modified_base 15: mod_base = OTHER; note = 2'-O-methylguanosine-3'-phosphate
  modified_base 16: mod_base = OTHER; note = 2'-deoxy-2'-fluorouridine-3'-phosphate
  modified_base 17: mod_base = OTHER; note = 2'-O-methylguanosine-3'-phosphate
  modified_base 18: mod_base = OTHER; note = 2'-O-methylguanosine-3'-phosphate
  modified_base 19: mod_base = OTHER; note = 2'-O-methylguanosine-3'-phosphate
  modified_base 20: mod_base = OTHER; note = 2'-O-methyluridine-3'-phosphate
  modified_base 21: mod_base = OTHER; note = 2'-O-methyladenosine-3'-phosphorothioate
  modified_base 22: mod_base = OTHER; note = 2'-O-methyluridine-3'-phosphorothioate
  modified_base 23: mod_base = OTHER; note = 2'-O-methyladenosine
atgaagtggctcatgtgggtata

SEQ ID NO: 1367 - RNA, 23 nt, synthetic construct
  source 1..23: mol_type = other RNA
  modified_base 1: mod_base = OTHER; note = 2'-O-methyladenosine-3'-phosphorothioate
  modified_base 2: mod_base = OTHER; note = 2'-deoxy-2'-fluoroguanosine-3'-phosphorothioate
  modified_base 3: mod_base = OTHER; note = 2'-O-methyluridine-3'-phosphate
  modified_base 4: mod_base = OTHER; note = 2'-O-methyluridine-3'-phosphate
  modified_base 5: mod_base = OTHER; note = 2'-O-methyluridine-3'-phosphate
  modified_base 6: mod_base = OTHER; note = 2'-deoxy-2'-fluorouridine-3'-phosphate
  modified_base 7: mod_base = OTHER; note = 2'-O-methyladenosine-3'-phosphate
  modified_base 8: mod_base = OTHER; note = 2'-deoxy-2'-fluorouridine-3'-phosphate
  modified_base 9: mod_base = OTHER; note = 2'-deoxy-2'-fluoroguanosine-3'-phosphate
  modified_base 10: mod_base = OTHER; note = 2'-O-methyladenosine-3'-phosphate
  modified_base 11: mod_base = OTHER; note = 2'-O-methyladenosine-3'-phosphate
  modified_base 12: mod_base = OTHER; note = 2'-O-methylguanosine-3'-phosphate
  modified_base 13: mod_base = OTHER; note = 2'-O-methyluridine-3'-phosphate
  modified_base 14: mod_base = OTHER; note = 2'-deoxy-2'-fluoroguanosine-3'-phosphate
  modified_base 15: mod_base = OTHER; note = 2'-O-methylguanosine-3'-phosphate
  modified_base 16: mod_base = OTHER; note = 2'-deoxy-2'-fluorocytidine-3'-phosphate
  modified_base 17: mod_base = OTHER; note = 2'-O-methyluridine-3'-phosphate
  modified_base 18: mod_base = OTHER; note = 2'-O-methylcytidine-3'-phosphate
  modified_base 19: mod_base = OTHER; note = 2'-O-methyladenosine-3'-phosphate
  modified_base 20: mod_base = OTHER; note = 2'-O-methyluridine-3'-phosphate
  modified_base 21: mod_base = OTHER; note = 2'-O-methylguanosine-3'-phosphorothioate
  modified_base 22: mod_base = OTHER; note = 2'-O-methyluridine-3'-phosphorothioate
  modified_base 23: mod_base = OTHER; note = 2'-O-methylguanosine
agttttatgaagtggctcatgtg

SEQ ID NO: 1368 - RNA, 23 nt, synthetic construct
  source 1..23: mol_type = other RNA
  modified_base 1: mod_base = OTHER; note = 2'-O-methyladenosine-3'-phosphorothioate
  modified_base 2: mod_base = OTHER; note = 2'-deoxy-2'-fluoroadenosine-3'-phosphorothioate
  modified_base 3: mod_base = OTHER; note = 2'-O-methyladenosine-3'-phosphate
  modified_base 4: mod_base = OTHER; note = 2'-O-methylcytidine-3'-phosphate
  modified_base 5: mod_base = OTHER; note = 2'-O-methyladenosine-3'-phosphate
  modified_base 6: mod_base = OTHER; note = 2'-deoxy-2'-fluorouridine-3'-phosphate
  modified_base 7: mod_base = OTHER; note = 2'-O-methyluridine-3'-phosphate
  modified_base 8: mod_base = OTHER; note = 2'-deoxy-2'-fluoroguanosine-3'-phosphate
  modified_base 9: mod_base = OTHER; note = 2'-deoxy-2'-fluorouridine-3'-phosphate
  modified_base 10: mod_base = OTHER; note = 2'-O-methyluridine-3'-phosphate
  modified_base 11: mod_base = OTHER; note = 2'-O-methyluridine-3'-phosphate
  modified_base 12: mod_base = OTHER; note = 2'-O-methyluridine-3'-phosphate
  modified_base 13: mod_base = OTHER; note = 2'-O-methyladenosine-3'-phosphate
  modified_base 14: mod_base = OTHER; note = 2'-deoxy-2'-fluorouridine-3'-phosphate
  modified_base 15: mod_base = OTHER; note = 2'-O-methylguanosine-3'-phosphate
  modified_base 16: mod_base = OTHER; note = 2'-deoxy-2'-fluoroadenosine-3'-phosphate
  modified_base 17: mod_base = OTHER; note = 2'-O-methyladenosine-3'-phosphate
  modified_base 18: mod_base = OTHER; note = 2'-O-methylguanosine-3'-phosphate
  modified_base 19: mod_base = OTHER; note = 2'-O-methyluridine-3'-phosphate
  modified_base 20: mod_base = OTHER; note = 2'-O-methylguanosine-3'-phosphate
  modified_base 21: mod_base = OTHER; note = 2'-O-methylguanosine-3'-phosphorothioate
  modified_base 22: mod_base = OTHER; note = 2'-O-methylcytidine-3'-phosphorothioate
  modified_base 23: mod_base = OTHER; note = 2'-O-methyluridine
aaacattgttttatgaagtggct

SEQ ID NO: 1369 - RNA, 23 nt, synthetic construct
  source 1..23: mol_type = other RNA
  modified_base 1: mod_base = OTHER; note = 2'-O-methyladenosine-3'-phosphorothioate
  modified_base 2: mod_base = OTHER; note = 2'-deoxy-2'-fluoroadenosine-3'-phosphorothioate
  modified_base 3: mod_base = OTHER; note = 2'-O-methylguanosine-3'-phosphate
  modified_base 4: mod_base = OTHER; note = 2'-O-methylguanosine-3'-phosphate
  modified_base 5: mod_base = OTHER; note = 2'-O-methyluridine-3'-phosphate
  modified_base 6: mod_base = OTHER; note = 2'-deoxy-2'-fluoroadenosine-3'-phosphate
  modified_base 7: mod_base = OTHER; note = 2'-O-methyladenosine-3'-phosphate
  modified_base 8: mod_base = OTHER; note = 2'-deoxy-2'-fluoroadenosine-3'-phosphate
  modified_base 9: mod_base = OTHER; note = 2'-deoxy-2'-fluoroguanosine-3'-phosphate
  modified_base 10: mod_base = OTHER; note = 2'-O-methyladenosine-3'-phosphate
  modified_base 11: mod_base = OTHER; note = 2'-O-methylguanosine-3'-phosphate
  modified_base 12: mod_base = OTHER; note = 2'-O-methyladenosine-3'-phosphate
  modified_base 13: mod_base = OTHER; note = 2'-O-methyladenosine-3'-phosphate
  modified_base 14: mod_base = OTHER; note = 2'-deoxy-2'-fluoroadenosine-3'-phosphate
  modified_base 15: mod_base = OTHER; note = 2'-O-methylcytidine-3'-phosphate
  modified_base 16: mod_base = OTHER; note = 2'-deoxy-2'-fluoroadenosine-3'-phosphate
  modified_base 17: mod_base = OTHER; note = 2'-O-methyluridine-3'-phosphate
  modified_base 18: mod_base = OTHER; note = 2'-O-methyluridine-3'-phosphate
  modified_base 19: mod_base = OTHER; note = 2'-O-methylguanosine-3'-phosphate
  modified_base 20: mod_base = OTHER; note = 2'-O-methyluridine-3'-phosphate
  modified_base 21: mod_base = OTHER; note = 2'-O-methyluridine-3'-phosphorothioate
  modified_base 22: mod_base = OTHER; note = 2'-O-methyluridine-3'-phosphorothioate
  modified_base 23: mod_base = OTHER; note = 2'-O-methyluridine
aaggtaaagagaaacattgtttt

SEQ ID NO: 1370 - RNA, 23 nt, synthetic construct
  source 1..23: mol_type = other RNA
  modified_base 1: mod_base = OTHER; note = 2'-O-methyladenosine-3'-phosphorothioate
  modified_base 2: mod_base = OTHER; note = 2'-deoxy-2'-fluoroguanosine-3'-phosphorothioate
  modified_base 3: mod_base = OTHER; note = 2'-O-methyluridine-3'-phosphate
  modified_base 4: mod_base = OTHER; note = 2'-O-methylguanosine-3'-phosphate
  modified_base 5: mod_base = OTHER; note = 2'-O-methylcytidine-3'-phosphate
  modified_base 6: mod_base = OTHER; note = 2'-deoxy-2'-fluorouridine-3'-phosphate
  modified_base 7: mod_base = OTHER; note = 2'-O-methyladenosine-3'-phosphate
  modified_base 8: mod_base = OTHER; note = 2'-deoxy-2'-fluoroadenosine-3'-phosphate
  modified_base 9: mod_base = OTHER; note = 2'-deoxy-2'-fluoroguanosine-3'-phosphate
  modified_base 10: mod_base = OTHER; note = 2'-O-methylguanosine-3'-phosphate
  modified_base 11: mod_base = OTHER; note = 2'-O-methyluridine-3'-phosphate
  modified_base 12: mod_base = OTHER; note = 2'-O-methyladenosine-3'-phosphate
  modified_base 13: mod_base = OTHER; note = 2'-O-methyladenosine-3'-phosphate
  modified_base 14: mod_base = OTHER; note = 2'-deoxy-2'-fluoroadenosine-3'-phosphate
  modified_base 15: mod_base = OTHER; note = 2'-O-methylguanosine-3'-phosphate
  modified_base 16: mod_base = OTHER; note = 2'-deoxy-2'-fluoroadenosine-3'-phosphate
  modified_base 17: mod_base = OTHER; note = 2'-O-methylguanosine-3'-phosphate
  modified_base 18: mod_base = OTHER; note = 2'-O-methyladenosine-3'-phosphate
  modified_base 19: mod_base = OTHER; note = 2'-O-methyladenosine-3'-phosphate
  modified_base 20: mod_base = OTHER; note = 2'-O-methyladenosine-3'-phosphate
  modified_base 21: mod_base = OTHER; note = 2'-O-methylcytidine-3'-phosphorothioate
  modified_base 22: mod_base = OTHER; note = 2'-O-methyladenosine-3'-phosphorothioate
  modified_base 23: mod_base = OTHER; note = 2'-O-methyluridine
agtgctaaggtaaagagaaacat

SEQ ID NO: 1371 - RNA, 23 nt, synthetic construct
  source 1..23: mol_type = other RNA
  modified_base 1: mod_base = OTHER; note = 2'-O-methyladenosine-3'-phosphorothioate
  modified_base 2: mod_base = OTHER; note = 2'-deoxy-2'-fluorouridine-3'-phosphorothioate
  modified_base 3: mod_base = OTHER; note = 2'-O-methyluridine-3'-phosphate
  modified_base 4: mod_base = OTHER; note = 2'-O-methyluridine-3'-phosphate
  modified_base 5: mod_base = OTHER; note = 2'-O-methyluridine-3'-phosphate
  modified_base 6: mod_base = OTHER; note = 2'-deoxy-2'-fluoroguanosine-3'-phosphate
  modified_base 7: mod_base = OTHER; note = 2'-O-methyladenosine-3'-phosphate
  modified_base 8: mod_base = OTHER; note = 2'-deoxy-2'-fluoroguanosine-3'-phosphate
  modified_base 9: mod_base = OTHER; note = 2'-deoxy-2'-fluoroguanosine-3'-phosphate
  modified_base 10: mod_base = OTHER; note = 2'-O-methyluridine-3'-phosphate
  modified_base 11: mod_base = OTHER; note = 2'-O-methylguanosine-3'-phosphate
  modified_base 12: mod_base = OTHER; note = 2'-O-methylcytidine-3'-phosphate
  modified_base 13: mod_base = OTHER; note = 2'-O-methyluridine-3'-phosphate
  modified_base 14: mod_base = OTHER; note = 2'-deoxy-2'-fluoroadenosine-3'-phosphate
  modified_base 15: mod_base = OTHER; note = 2'-O-methyladenosine-3'-phosphate
  modified_base 16: mod_base = OTHER; note = 2'-deoxy-2'-fluoroguanosine-3'-phosphate
  modified_base 17: mod_base = OTHER; note = 2'-O-methylguanosine-3'-phosphate
  modified_base 18: mod_base = OTHER; note = 2'-O-methyluridine-3'-phosphate
  modified_base 19: mod_base = OTHER; note = 2'-O-methyladenosine-3'-phosphate
  modified_base 20: mod_base = OTHER; note = 2'-O-methyladenosine-3'-phosphate
  modified_base 21: mod_base = OTHER; note = 2'-O-methyladenosine-3'-phosphorothioate
  modified_base 22: mod_base = OTHER; note = 2'-O-methylguanosine-3'-phosphorothioate
  modified_base 23: mod_base = OTHER; note = 2'-O-methyladenosine
attttgaggtgctaaggtaaaga

SEQ ID NO: 1372 - RNA, 23 nt, synthetic construct
  source 1..23: mol_type = other RNA
  modified_base 1: mod_base = OTHER; note = 2'-O-methyladenosine-3'-phosphorothioate
  modified_base 2: mod_base = OTHER; note = 2'-deoxy-2'-fluoroadenosine-3'-phosphorothioate
  modified_base 3: mod_base = OTHER; note = 2'-O-methyluridine-3'-phosphate
  modified_base 4: mod_base = OTHER; note = 2'-O-methylguanosine-3'-phosphate
  modified_base 5: mod_base = OTHER; note = 2'-O-methylguanosine-3'-phosphate
  modified_base 6: mod_base = OTHER; note = 2'-deoxy-2'-fluorouridine-3'-phosphate
  modified_base 7: mod_base = OTHER; note = 2'-O-methyladenosine-3'-phosphate
  modified_base 8: mod_base = OTHER; note = 2'-deoxy-2'-fluorouridine-3'-phosphate
  modified_base 9: mod_base = OTHER; note = 2'-deoxy-2'-fluorouridine-3'-phosphate
  modified_base 10: mod_base = OTHER; note = 2'-O-methyluridine-3'-phosphate
  modified_base 11: mod_base = OTHER; note = 2'-O-methyluridine-3'-phosphate
  modified_base 12: mod_base = OTHER; note = 2'-O-methylguanosine-3'-phosphate
  modified_base 13: mod_base = OTHER; note = 2'-O-methyladenosine-3'-phosphate
  modified_base 14: mod_base = OTHER; note = 2'-deoxy-2'-fluoroguanosine-3'-phosphate
  modified_base 15: mod_base = OTHER; note = 2'-O-methylguanosine-3'-phosphate
  modified_base 16: mod_base = OTHER; note = 2'-deoxy-2'-fluorouridine-3'-phosphate
  modified_base 17: mod_base = OTHER; note = 2'-O-methylguanosine-3'-phosphate
  modified_base 18: mod_base = OTHER; note = 2'-O-methylcytidine-3'-phosphate
  modified_base 19: mod_base = OTHER; note = 2'-O-methyluridine-3'-phosphate
  modified_base 20: mod_base = OTHER; note = 2'-O-methyladenosine-3'-phosphate
  modified_base 21: mod_base = OTHER; note = 2'-O-methyladenosine-3'-phosphorothioate
  modified_base 22: mod_base = OTHER; note = 2'-O-methylguanosine-3'-phosphorothioate
  modified_base 23: mod_base = OTHER; note = 2'-O-methylguanosine
aatggtattttgaggtgctaagg

SEQ ID NO: 1373 - RNA, 23 nt, synthetic construct
  source 1..23: mol_type = other RNA
  modified_base 1: mod_base = OTHER; note = 2'-O-methyladenosine-3'-phosphorothioate
  modified_base 2: mod_base = OTHER; note = 2'-deoxy-2'-fluoroadenosine-3'-phosphorothioate
  modified_base 3: mod_base = OTHER; note = 2'-O-methyladenosine-3'-phosphate
  modified_base 4: mod_base = OTHER; note = 2'-O-methyladenosine-3'-phosphate
  modified_base 5: mod_base = OTHER; note = 2'-O-methyluridine-3'-phosphate
  modified_base 6: mod_base = OTHER; note = 2'-deoxy-2'-fluoroguanosine-3'-phosphate
  modified_base 7: mod_base = OTHER; note = 2'-O-methylguanosine-3'-phosphate
  modified_base 8: mod_base = OTHER; note = 2'-deoxy-2'-fluorocytidine-3'-phosphate
  modified_base 9: mod_base = OTHER; note = 2'-deoxy-2'-fluoroadenosine-3'-phosphate
  modified_base 10: mod_base = OTHER; note = 2'-O-methyluridine-3'-phosphate
  modified_base 11: mod_base = OTHER; note = 2'-O-methylguanosine-3'-phosphate
  modified_base 12: mod_base = OTHER; note = 2'-O-methylguanosine-3'-phosphate
  modified_base 13: mod_base = OTHER; note = 2'-O-methyluridine-3'-phosphate
  modified_base 14: mod_base = OTHER; note = 2'-deoxy-2'-fluoroadenosine-3'-phosphate
  modified_base 15: mod_base = OTHER; note = 2'-O-methyluridine-3'-phosphate
  modified_base 16: mod_base = OTHER; note = 2'-deoxy-2'-fluorouridine-3'-phosphate
  modified_base 17: mod_base = OTHER; note = 2'-O-methyluridine-3'-phosphate
  modified_base 18: mod_base = OTHER; note = 2'-O-methyluridine-3'-phosphate
  modified_base 19: mod_base = OTHER; note = 2'-O-methylguanosine-3'-phosphate
  modified_base 20: mod_base = OTHER; note = 2'-O-methyladenosine-3'-phosphate
  modified_base 21: mod_base = OTHER; note = 2'-O-methylguanosine-3'-phosphorothioate
  modified_base 22: mod_base = OTHER; note = 2'-O-methylguanosine-3'-phosphorothioate
  modified_base 23: mod_base = OTHER; note = 2'-O-methyluridine
aaaatggcatggtattttgaggt

SEQ ID NO: 1374 - RNA, 23 nt, synthetic construct
  source 1..23: mol_type = other RNA
  modified_base 1: mod_base = OTHER; note = 2'-O-methyladenosine-3'-phosphorothioate
  modified_base 2: mod_base = OTHER; note = 2'-deoxy-2'-fluoroadenosine-3'-phosphorothioate
  modified_base 3: mod_base = OTHER; note = 2'-O-methyladenosine-3'-phosphate
  modified_base 4: mod_base = OTHER; note = 2'-O-methylguanosine-3'-phosphate
  modified_base 5: mod_base = OTHER; note = 2'-O-methylcytidine-3'-phosphate
  modified_base 6: mod_base = OTHER; note = 2'-deoxy-2'-fluorouridine-3'-phosphate
  modified_base 7: mod_base = OTHER; note = 2'-O-methyluridine-3'-phosphate
  modified_base 8: mod_base = OTHER; note = 2'-deoxy-2'-fluorouridine-3'-phosphate
  modified_base 9: mod_base = OTHER; note = 2'-deoxy-2'-fluoroadenosine-3'-phosphate
  modified_base 10: mod_base = OTHER; note = 2'-O-methyladenosine-3'-phosphate
  modified_base 11: mod_base = OTHER; note = 2'-O-methyladenosine-3'-phosphate
  modified_base 12: mod_base = OTHER; note = 2'-O-methyluridine-3'-phosphate
  modified_base 13: mod_base = OTHER; note = 2'-O-methylguanosine-3'-phosphate
  modified_base 14: mod_base = OTHER; note = 2'-deoxy-2'-fluoroguanosine-3'-phosphate
  modified_base 15: mod_base = OTHER; note = 2'-O-methylcytidine-3'-phosphate
  modified_base 16: mod_base = OTHER; note = 2'-deoxy-2'-fluoroadenosine-3'-phosphate
  modified_base 17: mod_base = OTHER; note = 2'-O-methyluridine-3'-phosphate
  modified_base 18: mod_base = OTHER; note = 2'-O-methylguanosine-3'-phosphate
  modified_base 19: mod_base = OTHER; note = 2'-O-methylguanosine-3'-phosphate
  modified_base 20: mod_base = OTHER; note = 2'-O-methyluridine-3'-phosphate
  modified_base 21: mod_base = OTHER; note = 2'-O-methyladenosine-3'-phosphorothioate
  modified_base 22: mod_base = OTHER; note = 2'-O-methyluridine-3'-phosphorothioate
  modified_base 23: mod_base = OTHER; note = 2'-O-methyluridine
aaagctttaaatggcatggtatt

SEQ ID NO: 1375 - RNA, 23 nt, synthetic construct
  source 1..23: mol_type = other RNA
  modified_base 1: mod_base = OTHER; note = 2'-O-methyladenosine-3'-phosphorothioate
  modified_base 2: mod_base = OTHER; note = 2'-deoxy-2'-fluorocytidine-3'-phosphorothioate
  modified_base 3: mod_base = OTHER; note = 2'-O-methyladenosine-3'-phosphate
  modified_base 4: mod_base = OTHER; note = 2'-O-methylguanosine-3'-phosphate
  modified_base 5: mod_base = OTHER; note = 2'-O-methyluridine-3'-phosphate
  modified_base 6: mod_base = OTHER; note = 2'-deoxy-2'-fluorouridine-3'-phosphate
  modified_base 7: mod_base = OTHER; note = 2'-O-methyluridine-3'-phosphate
  modified_base 8: mod_base = OTHER; note = 2'-deoxy-2'-fluorouridine-3'-phosphate
  modified_base 9: mod_base = OTHER; note = 2'-deoxy-2'-fluoroguanosine-3'-phosphate
  modified_base 10: mod_base = OTHER; note = 2'-O-methyladenosine-3'-phosphate
  modified_base 11: mod_base = OTHER; note = 2'-O-methylguanosine-3'-phosphate
  modified_base 12: mod_base = OTHER; note = 2'-O-methyladenosine-3'-phosphate
  modified_base 13: mod_base = OTHER; note = 2'-O-methyluridine-3'-phosphate
  modified_base 14: mod_base = OTHER; note = 2'-deoxy-2'-fluoroadenosine-3'-phosphate
  modified_base 15: mod_base = OTHER; note = 2'-O-methyladenosine-3'-phosphate
  modified_base 16: mod_base = OTHER; note = 2'-deoxy-2'-fluorouridine-3'-phosphate
  modified_base 17: mod_base = OTHER; note = 2'-O-methylguanosine-3'-phosphate
  modified_base 18: mod_base = OTHER; note = 2'-O-methyladenosine-3'-phosphate
  modified_base 19: mod_base = OTHER; note = 2'-O-methyladenosine-3'-phosphate
  modified_base 20: mod_base = OTHER; note = 2'-O-methyladenosine-3'-phosphate
  modified_base 21: mod_base = OTHER; note = 2'-O-methyladenosine-3'-phosphorothioate
  modified_base 22: mod_base = OTHER; note = 2'-O-methylcytidine-3'-phosphorothioate
  modified_base 23: mod_base = OTHER; note = 2'-O-methyladenosine
acagttttgagataatgaaaaca

SEQ ID NO: 1376 - RNA, 23 nt, synthetic construct
  source 1..23: mol_type = other RNA
  modified_base 1: mod_base = OTHER; note = 2'-O-methyladenosine-3'-phosphorothioate
  modified_base 2: mod_base = OTHER; note = 2'-deoxy-2'-fluorouridine-3'-phosphorothioate
  modified_base 3: mod_base = OTHER; note = 2'-O-methyluridine-3'-phosphate
  modified_base 4: mod_base = OTHER; note = 2'-O-methylguanosine-3'-phosphate
  modified_base 5: mod_base = OTHER; note = 2'-O-methyladenosine-3'-phosphate
  modified_base 6: mod_base = OTHER; note = 2'-deoxy-2'-fluorocytidine-3'-phosphate
  modified_base 7: mod_base = OTHER; note = 2'-O-methyladenosine-3'-phosphate
  modified_base 8: mod_base = OTHER; note = 2'-deoxy-2'-fluoroguanosine-3'-phosphate
  modified_base 9: mod_base = OTHER; note = 2'-deoxy-2'-fluorouridine-3'-phosphate
  modified_base 10: mod_base = OTHER; note = 2'-O-methylguanosine-3'-phosphate
  modified_base 11: mod_base = OTHER; note = 2'-O-methylcytidine-3'-phosphate
  modified_base 12: mod_base = OTHER; note = 2'-O-methyladenosine-3'-phosphate
  modified_base 13: mod_base = OTHER; note = 2'-O-methylguanosine-3'-phosphate
  modified_base 14: mod_base = OTHER; note = 2'-deoxy-2'-fluorouridine-3'-phosphate
  modified_base 15: mod_base = OTHER; note = 2'-O-methyluridine-3'-phosphate
  modified_base 16: mod_base = OTHER; note = 2'-deoxy-2'-fluorouridine-3'-phosphate
  modified_base 17: mod_base = OTHER; note = 2'-O-methyluridine-3'-phosphate
  modified_base 18: mod_base = OTHER; note = 2'-O-methylguanosine-3'-phosphate
  modified_base 19: mod_base = OTHER; note = 2'-O-methyladenosine-3'-phosphate
  modified_base 20: mod_base = OTHER; note = 2'-O-methylguanosine-3'-phosphate
  modified_base 21: mod_base = OTHER; note = 2'-O-methyladenosine-3'-phosphorothioate
  modified_base 22: mod_base = OTHER; note = 2'-O-methyluridine-3'-phosphorothioate
  modified_base 23: mod_base = OTHER; note = 2'-O-methyladenosine
attgacagtgcagttttgagata

SEQ ID NO: 1377 - RNA, 23 nt, synthetic construct
  source 1..23: mol_type = other RNA
  modified_base 1: mod_base = OTHER; note = 2'-O-methyladenosine-3'-phosphorothioate
  modified_base 2: mod_base = OTHER; note = 2'-deoxy-2'-fluorouridine-3'-phosphorothioate
  modified_base 3: mod_base = OTHER; note = 2'-O-methylcytidine-3'-phosphate
  modified_base 4: mod_base = OTHER; note = 2'-O-methyladenosine-3'-phosphate
  modified_base 5: mod_base = OTHER; note = 2'-O-methyluridine-3'-phosphate
  modified_base 6: mod_base = OTHER; note = 2'-deoxy-2'-fluorocytidine-3'-phosphate
  modified_base 7: mod_base = OTHER; note = 2'-O-methyladenosine-3'-phosphate
  modified_base 8: mod_base = OTHER; note = 2'-deoxy-2'-fluorouridine-3'-phosphate
  modified_base 9: mod_base = OTHER; note = 2'-deoxy-2'-fluorocytidine-3'-phosphate
  modified_base 10: mod_base = OTHER; note = 2'-O-methyluridine-3'-phosphate
  modified_base 11: mod_base = OTHER; note = 2'-O-methyluridine-3'-phosphate
  modified_base 12: mod_base = OTHER; note = 2'-O-methylguanosine-3'-phosphate
  modified_base 13: mod_base = OTHER; note = 2'-O-methyladenosine-3'-phosphate
  modified_base 14: mod_base = OTHER; note = 2'-deoxy-2'-fluorocytidine-3'-phosphate
  modified_base 15: mod_base = OTHER; note = 2'-O-methyladenosine-3'-phosphate
  modified_base 16: mod_base = OTHER; note = 2'-deoxy-2'-fluoroguanosine-3'-phosphate
  modified_base 17: mod_base = OTHER; note = 2'-O-methyluridine-3'-phosphate
  modified_base 18: mod_base = OTHER; note = 2'-O-methylguanosine-3'-phosphate
  modified_base 19: mod_base = OTHER; note = 2'-O-methylcytidine-3'-phosphate
  modified_base 20: mod_base = OTHER; note = 2'-O-methyladenosine-3'-phosphate
  modified_base 21: mod_base = OTHER; note = 2'-O-methylguanosine-3'-phosphorothioate
  modified_base 22: mod_base = OTHER; note = 2'-O-methyluridine-3'-phosphorothioate
  modified_base 23: mod_base = OTHER; note = 2'-O-methyluridine
atcatcatcttgacagtgcagtt

SEQ ID NO: 1378 - RNA, 23 nt, synthetic construct
  source 1..23: mol_type = other RNA
  modified_base 1: mod_base = OTHER; note = 2'-O-methyladenosine-3'-phosphorothioate
  modified_base 2: mod_base = OTHER; note = 2'-deoxy-2'-fluorouridine-3'-phosphorothioate
  modified_base 3: mod_base = OTHER; note = 2'-O-methyladenosine-3'-phosphate
  modified_base 4: mod_base = OTHER; note = 2'-O-methyladenosine-3'-phosphate
  modified_base 5: mod_base = OTHER; note = 2'-O-methyladenosine-3'-phosphate
  modified_base 6: mod_base = OTHER; note = 2'-deoxy-2'-fluoroguanosine-3'-phosphate
  modified_base 7: mod_base = OTHER; note = 2'-O-methyladenosine-3'-phosphate
  modified_base 8: mod_base = OTHER; note = 2'-deoxy-2'-fluorouridine-3'-phosphate
  modified_base 9: mod_base = OTHER; note = 2'-deoxy-2'-fluorocytidine-3'-phosphate
  modified_base 10: mod_base = OTHER; note = 2'-O-methyladenosine-3'-phosphate
  modified_base 11: mod_base = OTHER; note = 2'-O-methyluridine-3'-phosphate
  modified_base 12: mod_base = OTHER; note = 2'-O-methylcytidine-3'-phosphate
  modified_base 13: mod_base = OTHER; note = 2'-O-methyladenosine-3'-phosphate
  modified_base 14: mod_base = OTHER; note = 2'-deoxy-2'-fluorouridine-3'-phosphate
  modified_base 15: mod_base = OTHER; note = 2'-O-methylcytidine-3'-phosphate
  modified_base 16: mod_base = OTHER; note = 2'-deoxy-2'-fluoroadenosine-3'-phosphate
  modified_base 17: mod_base = OTHER; note = 2'-O-methyluridine-3'-phosphate
  modified_base 18: mod_base = OTHER; note = 2'-O-methylcytidine-3'-phosphate
  modified_base 19: mod_base = OTHER; note = 2'-O-methyluridine-3'-phosphate
  modified_base 20: mod_base = OTHER; note = 2'-O-methyluridine-3'-phosphate
  modified_base 21: mod_base = OTHER; note = 2'-O-methylguanosine-3'-phosphorothioate
  modified_base 22: mod_base = OTHER; note = 2'-O-methyladenosine-3'-phosphorothioate
  modified_base 23: mod_base = OTHER; note = 2'-O-methylcytidine
ataaagatcatcatcatcttgac

SEQ ID NO: 1379 - RNA, 23 nt, synthetic construct
  source 1..23: mol_type = other RNA
  modified_base 1: mod_base = OTHER; note = 2'-O-methyladenosine-3'-phosphorothioate
  modified_base 2: mod_base = OTHER; note = 2'-deoxy-2'-fluoroguanosine-3'-phosphorothioate
  modified_base 3: mod_base = OTHER; note = 2'-O-methyladenosine-3'-phosphate
  modified_base 4: mod_base = OTHER; note = 2'-O-methylguanosine-3'-phosphate
  modified_base 5: mod_base = OTHER; note = 2'-O-methyluridine-3'-phosphate
  modified_base 6: mod_base = OTHER; note = 2'-deoxy-2'-fluoroguanosine-3'-phosphate
  modified_base 7: mod_base = OTHER; note = 2'-O-methyluridine-3'-phosphate
  modified_base 8: mod_base = OTHER; note = 2'-deoxy-2'-fluoroguanosine-3'-phosphate
  modified_base 9: mod_base = OTHER; note = 2'-deoxy-2'-fluorouridine-3'-phosphate
  modified_base 10: mod_base = OTHER; note = 2'-O-methyladenosine-3'-phosphate
  modified_base 11: mod_base = OTHER; note = 2'-O-methyluridine-3'-phosphate
  modified_base 12: mod_base = OTHER; note = 2'-O-methyluridine-3'-phosphate
  modified_base 13: mod_base = OTHER; note = 2'-O-methyluridine-3'-phosphate
  modified_base 14: mod_base = OTHER; note = 2'-deoxy-2'-fluorouridine-3'-phosphate
  modified_base 15: mod_base = OTHER; note = 2'-O-methyladenosine-3'-phosphate
  modified_base 16: mod_base = OTHER; note = 2'-deoxy-2'-fluoroadenosine-3'-phosphate
  modified_base 17: mod_base = OTHER; note = 2'-O-methyladenosine-3'-phosphate
  modified_base 18: mod_base = OTHER; note = 2'-O-methylguanosine-3'-phosphate
  modified_base 19: mod_base = OTHER; note = 2'-O-methyladenosine-3'-phosphate
  modified_base 20: mod_base = OTHER; note = 2'-O-methyluridine-3'-phosphate
  modified_base 21: mod_base = OTHER; note = 2'-O-methylcytidine-3'-phosphorothioate
  modified_base 22: mod_base = OTHER; note = 2'-O-methyladenosine-3'-phosphorothioate
  modified_base 23: mod_base = OTHER; note = 2'-O-methyluridine
agagtgtgtattttaaagatcat

SEQ ID NO: 1380 - RNA, 23 nt, synthetic construct
  source 1..23: mol_type = other RNA
  modified_base 1: mod_base = OTHER; note = 2'-O-methyladenosine-3'-phosphorothioate
  modified_base 2: mod_base = OTHER; note = 2'-deoxy-2'-fluorocytidine-3'-phosphorothioate
  modified_base 3: mod_base = OTHER; note = 2'-O-methyluridine-3'-phosphate
  modified_base 4: mod_base = OTHER; note = 2'-O-methyluridine-3'-phosphate
  modified_base 5: mod_base = OTHER; note = 2'-O-methylguanosine-3'-phosphate
  modified_base 6: mod_base = OTHER; note = 2'-deoxy-2'-fluoroadenosine-3'-phosphate
  modified_base 7: mod_base = OTHER; note = 2'-O-methyluridine-3'-phosphate
  modified_base 8: mod_base = OTHER; note = 2'-deoxy-2'-fluorouridine-3'-phosphate
  modified_base 9: mod_base = OTHER; note = 2'-deoxy-2'-fluorouridine-3'-phosphate
  modified_base 10: mod_base = OTHER; note = 2'-O-methylguanosine-3'-phosphate
  modified_base 11: mod_base = OTHER; note = 2'-O-methyladenosine-3'-phosphate
  modified_base 12: mod_base = OTHER; note = 2'-O-methylguanosine-3'-phosphate
  modified_base 13: mod_base = OTHER; note = 2'-O-methyluridine-3'-phosphate
  modified_base 14: mod_base = OTHER; note = 2'-deoxy-2'-fluoroguanosine-3'-phosphate
  modified_base 15: mod_base = OTHER; note = 2'-O-methyluridine-3'-phosphate
  modified_base 16: mod_base = OTHER; note = 2'-deoxy-2'-fluoroguanosine-3'-phosphate
  modified_base 17: mod_base = OTHER; note = 2'-O-methyluridine-3'-phosphate
  modified_base 18: mod_base = OTHER; note = 2'-O-methyladenosine-3'-phosphate
  modified_base 19: mod_base = OTHER; note = 2'-O-methyluridine-3'-phosphate
  modified_base 20: mod_base = OTHER; note = 2'-O-methyluridine-3'-phosphate
  modified_base 21: mod_base = OTHER; note = 2'-O-methyluridine-3'-phosphorothioate
  modified_base 22: mod_base = OTHER; note = 2'-O-methyluridine-3'-phosphorothioate
  modified_base 23: mod_base = OTHER; note = 2'-O-methyladenosine
acttgatttgagtgtgtatttta

SEQ ID NO: 1381 - RNA, 23 nt, synthetic construct
  source 1..23: mol_type = other RNA
  modified_base 1: mod_base = OTHER; note = 2'-O-methyladenosine-3'-phosphorothioate
  modified_base 2: mod_base = OTHER; note = 2'-deoxy-2'-fluorouridine-3'-phosphorothioate
  modified_base 3: mod_base = OTHER; note = 2'-O-methyluridine-3'-phosphate
  modified_base 4: mod_base = OTHER; note = 2'-O-methyladenosine-3'-phosphate
  modified_base 5: mod_base = OTHER; note = 2'-O-methyladenosine-3'-phosphate
  modified_base 6: mod_base = OTHER; note = 2'-deoxy-2'-fluoroguanosine-3'-phosphate
  modified_base 7: mod_base = OTHER; note = 2'-O-methyluridine-3'-phosphate
  modified_base 8: mod_base = OTHER; note = 2'-deoxy-2'-fluorouridine-3'-phosphate
  modified_base 9: mod_base = OTHER; note = 2'-deoxy-2'-fluorouridine-3'-phosphate
  modified_base 10: mod_base = OTHER; note = 2'-O-methylcytidine-3'-phosphate
  modified_base 11: mod_base = OTHER; note = 2'-O-methyluridine-3'-phosphate
  modified_base 12: mod_base = OTHER; note = 2'-O-methyluridine-3'-phosphate
  modified_base 13: mod_base = OTHER; note = 2'-O-methylguanosine-3'-phosphate
  modified_base 14: mod_base = OTHER; note = 2'-deoxy-2'-fluoroadenosine-3'-phosphate
  modified_base 15: mod_base = OTHER; note = 2'-O-methyluridine-3'-phosphate
  modified_base 16: mod_base = OTHER; note = 2'-deoxy-2'-fluorouridine-3'-phosphate
  modified_base 17: mod_base = OTHER; note = 2'-O-methyluridine-3'-phosphate
  modified_base 18: mod_base = OTHER; note = 2'-O-methylguanosine-3'-phosphate
  modified_base 19: mod_base = OTHER; note = 2'-O-methyladenosine-3'-phosphate
  modified_base 20: mod_base = OTHER; note = 2'-O-methylguanosine-3'-phosphate
  modified_base 21: mod_base = OTHER; note = 2'-O-methyluridine-3'-phosphorothioate
  modified_base 22: mod_base = OTHER; note = 2'-O-methylguanosine-3'-phosphorothioate
  modified_base 23: mod_base = OTHER; note = 2'-O-methyluridine
attaagtttcttgatttgagtgt

SEQ ID NO: 1382 - RNA, 23 nt, synthetic construct
  source 1..23: mol_type = other RNA
  modified_base 1: mod_base = OTHER; note = 2'-O-methyladenosine-3'-phosphorothioate
  modified_base 2: mod_base = OTHER; note = 2'-deoxy-2'-fluoroguanosine-3'-phosphorothioate
  modified_base 3: mod_base = OTHER; note = 2'-O-methyluridine-3'-phosphate
  modified_base 4: mod_base = OTHER; note = 2'-O-methyladenosine-3'-phosphate
  modified_base 5: mod_base = OTHER; note = 2'-O-methyladenosine-3'-phosphate
  modified_base 6: mod_base = OTHER; note = 2'-deoxy-2'-fluorocytidine-3'-phosphate
  modified_base 7: mod_base = OTHER; note = 2'-O-methylcytidine-3'-phosphate
  modified_base 8: mod_base = OTHER; note = 2'-deoxy-2'-fluorouridine-3'-phosphate
  modified_base 9: mod_base = OTHER; note = 2'-deoxy-2'-fluorouridine-3'-phosphate
  modified_base 10: mod_base = OTHER; note = 2'-O-methyladenosine-3'-phosphate
  modified_base 11: mod_base = OTHER; note = 2'-O-methyladenosine-3'-phosphate
  modified_base 12: mod_base = OTHER; note = 2'-O-methylguanosine-3'-phosphate
  modified_base 13: mod_base = OTHER; note = 2'-O-methyluridine-3'-phosphate
  modified_base 14: mod_base = OTHER; note = 2'-deoxy-2'-fluorouridine-3'-phosphate
  modified_base 15: mod_base = OTHER; note = 2'-O-methyluridine-3'-phosphate
  modified_base 16: mod_base = OTHER; note = 2'-deoxy-2'-fluorocytidine-3'-phosphate
  modified_base 17: mod_base = OTHER; note = 2'-O-methyluridine-3'-phosphate
  modified_base 18: mod_base = OTHER; note = 2'-O-methyluridine-3'-phosphate
  modified_base 19: mod_base = OTHER; note = 2'-O-methylguanosine-3'-phosphate
  modified_base 20: mod_base = OTHER; note = 2'-O-methyladenosine-3'-phosphate
  modified_base 21: mod_base = OTHER; note = 2'-O-methyluridine-3'-phosphorothioate
  modified_base 22: mod_base = OTHER; note = 2'-O-methyluridine-3'-phosphorothioate
  modified_base 23: mod_base = OTHER; note = 2'-O-methyluridine
agtaaccttaagtttcttgattt

SEQ ID NO: 1383 - RNA, 23 nt, synthetic construct
  source 1..23: mol_type = other RNA
  modified_base 1: mod_base = OTHER; note = 2'-O-methyladenosine-3'-phosphorothioate
  modified_base 2: mod_base = OTHER; note = 2'-deoxy-2'-fluoroguanosine-3'-phosphorothioate
  modified_base 3: mod_base = OTHER; note = 2'-O-methyladenosine-3'-phosphate
  modified_base 4: mod_base = OTHER; note = 2'-O-methyladenosine-3'-phosphate
  modified_base 5: mod_base = OTHER; note = 2'-O-methylcytidine-3'-phosphate
  modified_base 6: mod_base = OTHER; note = 2'-deoxy-2'-fluoroadenosine-3'-phosphate
  modified_base 7: mod_base = OTHER; note = 2'-O-methyladenosine-3'-phosphate
  modified_base 8: mod_base = OTHER; note = 2'-deoxy-2'-fluoroadenosine-3'-phosphate
  modified_base 9: mod_base = OTHER; note = 2'-deoxy-2'-fluoroguanosine-3'-phosphate
  modified_base 10: mod_base = OTHER; note = 2'-O-methylguanosine-3'-phosphate
  modified_base 11: mod_base = OTHER; note = 2'-O-methyluridine-3'-phosphate
  modified_base 12: mod_base = OTHER; note = 2'-O-methyladenosine-3'-phosphate
  modified_base 13: mod_base = OTHER; note = 2'-O-methyladenosine-3'-phosphate
  modified_base 14: mod_base = OTHER; note = 2'-deoxy-2'-fluorocytidine-3'-phosphate
  modified_base 15: mod_base = OTHER; note = 2'-O-methylcytidine-3'-phosphate
  modified_base 16: mod_base = OTHER; note = 2'-deoxy-2'-fluorouridine-3'-phosphate
  modified_base 17: mod_base = OTHER; note = 2'-O-methyluridine-3'-phosphate
  modified_base 18: mod_base = OTHER; note = 2'-O-methyladenosine-3'-phosphate
  modified_base 19: mod_base = OTHER; note = 2'-O-methyladenosine-3'-phosphate
  modified_base 20: mod_base = OTHER; note = 2'-O-methylguanosine-3'-phosphate
  modified_base 21: mod_base = OTHER; note = 2'-O-methyluridine-3'-phosphorothioate
  modified_base 22: mod_base = OTHER; note = 2'-O-methyluridine-3'-phosphorothioate
  modified_base 23: mod_base = OTHER; note = 2'-O-methyluridine
agaacaaaggtaaccttaagttt

SEQ ID NO: 1384 - RNA, 23 nt, synthetic construct
  source 1..23: mol_type = other RNA
  modified_base 1: mod_base = OTHER; note = 2'-O-methyladenosine-3'-phosphorothioate
  modified_base 2: mod_base = OTHER; note = 2'-deoxy-2'-fluorouridine-3'-phosphorothioate
  modified_base 3: mod_base = OTHER; note = 2'-O-methylguanosine-3'-phosphate
  modified_base 4: mod_base = OTHER; note = 2'-O-methyladenosine-3'-phosphate
  modified_base 5: mod_base = OTHER; note = 2'-O-methyladenosine-3'-phosphate
  modified_base 6: mod_base = OTHER; note = 2'-deoxy-2'-fluoroadenosine-3'-phosphate
  modified_base 7: mod_base = OTHER; note = 2'-O-methyluridine-3'-phosphate
  modified_base 8: mod_base = OTHER; note = 2'-deoxy-2'-fluorouridine-3'-phosphate
  modified_base 9: mod_base = OTHER; note = 2'-deoxy-2'-fluorouridine-3'-phosphate
  modified_base 10: mod_base = OTHER; note = 2'-O-methylguanosine-3'-phosphate
  modified_base 11: mod_base = OTHER; note = 2'-O-methylguanosine-3'-phosphate
  modified_base 12: mod_base = OTHER; note = 2'-O-methylguanosine-3'-phosphate
  modified_base 13: mod_base = OTHER; note = 2'-O-methyladenosine-3'-phosphate
  modified_base 14: mod_base = OTHER; note = 2'-deoxy-2'-fluoroadenosine-3'-phosphate
  modified_base 15: mod_base = OTHER; note = 2'-O-methylcytidine-3'-phosphate
  modified_base 16: mod_base = OTHER; note = 2'-deoxy-2'-fluoroadenosine-3'-phosphate
  modified_base 17: mod_base = OTHER; note = 2'-O-methyladenosine-3'-phosphate
  modified_base 18: mod_base = OTHER; note = 2'-O-methyladenosine-3'-phosphate
  modified_base 19: mod_base = OTHER; note = 2'-O-methylguanosine-3'-phosphate
  modified_base 20: mod_base = OTHER; note = 2'-O-methylguanosine-3'-phosphate
  modified_base 21: mod_base = OTHER; note = 2'-O-methyluridine-3'-phosphorothioate
  modified_base 22: mod_base = OTHER; note = 2'-O-methyladenosine-3'-phosphorothioate
  modified_base 23: mod_base = OTHER; note = 2'-O-methyladenosine
atgaaatttgggaacaaaggtaa

SEQ ID NO: 1385 - RNA, 23 nt, synthetic construct
  source 1..23: mol_type = other RNA
  modified_base 1: mod_base = OTHER; note = 2'-O-methyladenosine-3'-phosphorothioate
  modified_base 2: mod_base = OTHER; note = 2'-deoxy-2'-fluorouridine-3'-phosphorothioate
  modified_base 3: mod_base = OTHER; note = 2'-O-methyladenosine-3'-phosphate
  modified_base 4: mod_base = OTHER; note = 2'-O-methylguanosine-3'-phosphate
  modified_base 5: mod_base = OTHER; note = 2'-O-methylguanosine-3'-phosphate
  modified_base 6: mod_base = OTHER; note = 2'-deoxy-2'-fluorouridine-3'-phosphate
  modified_base 7: mod_base = OTHER; note = 2'-O-methyladenosine-3'-phosphate
  modified_base 8: mod_base = OTHER; note = 2'-deoxy-2'-fluorouridine-3'-phosphate
  modified_base 9: mod_base = OTHER; note = 2'-deoxy-2'-fluoroguanosine-3'-phosphate
  modified_base 10: mod_base = OTHER; note = 2'-O-methyladenosine-3'-phosphate
  modified_base 11: mod_base = OTHER; note = 2'-O-methyladenosine-3'-phosphate
  modified_base 12: mod_base = OTHER; note = 2'-O-methyladenosine-3'-phosphate
  modified_base 13: mod_base = OTHER; note = 2'-O-methyluridine-3'-phosphate
  modified_base 14: mod_base = OTHER; note = 2'-deoxy-2'-fluorouridine-3'-phosphate
  modified_base 15: mod_base = OTHER; note = 2'-O-methyluridine-3'-phosphate
  modified_base 16: mod_base = OTHER; note = 2'-deoxy-2'-fluoroguanosine-3'-phosphate
  modified_base 17: mod_base = OTHER; note = 2'-O-methylguanosine-3'-phosphate
  modified_base 18: mod_base = OTHER; note = 2'-O-methylguanosine-3'-phosphate
  modified_base 19: mod_base = OTHER; note = 2'-O-methyladenosine-3'-phosphate
  modified_base 20: mod_base = OTHER; note = 2'-O-methyladenosine-3'-phosphate
  modified_base 21: mod_base = OTHER; note = 2'-O-methylcytidine-3'-phosphorothioate
  modified_base 22: mod_base = OTHER; note = 2'-O-methyladenosine-3'-phosphorothioate
  modified_base 23: mod_base = OTHER; note = 2'-O-methyladenosine
ataggtatgaaatttgggaacaa

SEQ ID NO: 1386 - RNA, 23 nt, synthetic construct
  source 1..23: mol_type = other RNA
  modified_base 1: mod_base = OTHER; note = 2'-O-methyladenosine-3'-phosphorothioate
  modified_base 2: mod_base = OTHER; note = 2'-deoxy-2'-fluoroadenosine-3'-phosphorothioate
  modified_base 3: mod_base = OTHER; note = 2'-O-methylguanosine-3'-phosphate
  modified_base 4: mod_base = OTHER; note = 2'-O-methyladenosine-3'-phosphate
  modified_base 5: mod_base = OTHER; note = 2'-O-methyluridine-3'-phosphate
  modified_base 6: mod_base = OTHER; note = 2'-deoxy-2'-fluoroguanosine-3'-phosphate
  modified_base 7: mod_base = OTHER; note = 2'-O-methyladenosine-3'-phosphate
  modified_base 8: mod_base = OTHER; note = 2'-deoxy-2'-fluorouridine-3'-phosphate
  modified_base 9: mod_base = OTHER; note = 2'-deoxy-2'-fluoroadenosine-3'-phosphate
  modified_base 10: mod_base = OTHER; note = 2'-O-methylguanosine-3'-phosphate
  modified_base 11: mod_base = OTHER; note = 2'-O-methylguanosine-3'-phosphate
  modified_base 12: mod_base = OTHER; note = 2'-O-methyluridine-3'-phosphate
  modified_base 13: mod_base = OTHER; note = 2'-O-methyladenosine-3'-phosphate
  modified_base 14: mod_base = OTHER; note = 2'-deoxy-2'-fluorouridine-3'-phosphate
  modified_base 15: mod_base = OTHER; note = 2'-O-methylguanosine-3'-phosphate
  modified_base 16: mod_base = OTHER; note = 2'-deoxy-2'-fluoroadenosine-3'-phosphate
  modified_base 17: mod_base = OTHER; note = 2'-O-methyladenosine-3'-phosphate
  modified_base 18: mod_base = OTHER; note = 2'-O-methyladenosine-3'-phosphate
  modified_base 19: mod_base = OTHER; note = 2'-O-methyluridine-3'-phosphate
  modified_base 20: mod_base = OTHER; note = 2'-O-methyluridine-3'-phosphate
  modified_base 21: mod_base = OTHER; note = 2'-O-methyluridine-3'-phosphorothioate
  modified_base 22: mod_base = OTHER; note = 2'-O-methylguanosine-3'-phosphorothioate
  modified_base 23: mod_base = OTHER; note = 2'-O-methylguanosine
aagatgataggtatgaaatttgg

SEQ ID NO: 1387 - RNA, 23 nt, synthetic construct
  source 1..23: mol_type = other RNA
  modified_base 1: mod_base = OTHER; note = 2'-O-methyladenosine-3'-phosphorothioate
  modified_base 2: mod_base = OTHER; note = 2'-deoxy-2'-fluorocytidine-3'-phosphorothioate
  modified_base 3: mod_base = OTHER; note = 2'-O-methyluridine-3'-phosphate
  modified_base 4: mod_base = OTHER; note = 2'-O-methyladenosine-3'-phosphate
  modified_base 5: mod_base = OTHER; note = 2'-O-methylcytidine-3'-phosphate
  modified_base 6: mod_base = OTHER; note = 2'-deoxy-2'-fluorouridine-3'-phosphate
  modified_base 7: mod_base = OTHER; note = 2'-O-methyluridine-3'-phosphate
  modified_base 8: mod_base = OTHER; note = 2'-deoxy-2'-fluoroadenosine-3'-phosphate
  modified_base 9: mod_base = OTHER; note = 2'-deoxy-2'-fluoroadenosine-3'-phosphate
  modified_base 10: mod_base = OTHER; note = 2'-O-methylguanosine-3'-phosphate
  modified_base 11: mod_base = OTHER; note = 2'-O-methyladenosine-3'-phosphate
  modified_base 12: mod_base = OTHER; note = 2'-O-methyluridine-3'-phosphate
  modified_base 13: mod_base = OTHER; note = 2'-O-methylguanosine-3'-phosphate
  modified_base 14: mod_base = OTHER; note = 2'-deoxy-2'-fluoroadenosine-3'-phosphate
  modified_base 15: mod_base = OTHER; note = 2'-O-methyluridine-3'-phosphate
  modified_base 16: mod_base = OTHER; note = 2'-deoxy-2'-fluoroadenosine-3'-phosphate
  modified_base 17: mod_base = OTHER; note = 2'-O-methylguanosine-3'-phosphate
  modified_base 18: mod_base = OTHER; note = 2'-O-methylguanosine-3'-phosphate
  modified_base 19: mod_base = OTHER; note = 2'-O-methyluridine-3'-phosphate
  modified_base 20: mod_base = OTHER; note = 2'-O-methyladenosine-3'-phosphate
  modified_base 21: mod_base = OTHER; note = 2'-O-methyluridine-3'-phosphorothioate
  modified_base 22: mod_base = OTHER; note = 2'-O-methylguanosine-3'-phosphorothioate
  modified_base 23: mod_base = OTHER; note = 2'-O-methyladenosine
actacttaagatgataggtatga

SEQ ID NO: 1388 - RNA, 23 nt, synthetic construct
  source 1..23: mol_type = other RNA
  modified_base 1: mod_base = OTHER; note = 2'-O-methyladenosine-3'-phosphorothioate
  modified_base 2: mod_base = OTHER; note = 2'-deoxy-2'-fluoroadenosine-3'-phosphorothioate
  modified_base 3: mod_base = OTHER; note = 2'-O-methylguanosine-3'-phosphate
  modified_base 4: mod_base = OTHER; note = 2'-O-methyladenosine-3'-phosphate
  modified_base 5: mod_base = OTHER; note = 2'-O-methyladenosine-3'-phosphate
  modified_base 6: mod_base = OTHER; note = 2'-deoxy-2'-fluoroguanosine-3'-phosphate
  modified_base 7: mod_base = OTHER; note = 2'-O-methyluridine-3'-phosphate
  modified_base 8: mod_base = OTHER; note = 2'-deoxy-2'-fluorocytidine-3'-phosphate
  modified_base 9: mod_base = OTHER; note = 2'-deoxy-2'-fluorocytidine-3'-phosphate
  modified_base 10: mod_base = OTHER; note = 2'-O-methylcytidine-3'-phosphate
  modified_base 11: mod_base = OTHER; note = 2'-O-methyluridine-3'-phosphate
  modified_base 12: mod_base = OTHER; note = 2'-O-methyladenosine-3'-phosphate
  modified_base 13: mod_base = OTHER; note = 2'-O-methylcytidine-3'-phosphate
  modified_base 14: mod_base = OTHER; note = 2'-deoxy-2'-fluorouridine-3'-phosphate
  modified_base 15: mod_base = OTHER; note = 2'-O-methyluridine-3'-phosphate
  modified_base 16: mod_base = OTHER; note = 2'-deoxy-2'-fluoroadenosine-3'-phosphate
  modified_base 17: mod_base = OTHER; note = 2'-O-methyladenosine-3'-phosphate
  modified_base 18: mod_base = OTHER; note = 2'-O-methylguanosine-3'-phosphate
  modified_base 19: mod_base = OTHER; note = 2'-O-methyladenosine-3'-phosphate
  modified_base 20: mod_base = OTHER; note = 2'-O-methyluridine-3'-phosphate
  modified_base 21: mod_base = OTHER; note = 2'-O-methylguanosine-3'-phosphorothioate
  modified_base 22: mod_base = OTHER; note = 2'-O-methyladenosine-3'-phosphorothioate
  modified_base 23: mod_base = OTHER; note = 2'-O-methyluridine
aagaagtccctacttaagatgat

SEQ ID NO: 1389 - RNA, 23 nt, synthetic construct
  source 1..23: mol_type = other RNA
  modified_base 1: mod_base = OTHER; note = 2'-O-methyladenosine-3'-phosphorothioate
  modified_base 2: mod_base = OTHER; note = 2'-deoxy-2'-fluorouridine-3'-phosphorothioate
  modified_base 3: mod_base = OTHER; note = 2'-O-methyluridine-3'-phosphate
  modified_base 4: mod_base = OTHER; note = 2'-O-methylguanosine-3'-phosphate
  modified_base 5: mod_base = OTHER; note = 2'-O-methyluridine-3'-phosphate
  modified_base 6: mod_base = OTHER; note = 2'-deoxy-2'-fluoroguanosine-3'-phosphate
  modified_base 7: mod_base = OTHER; note = 2'-O-methyladenosine-3'-phosphate
  modified_base 8: mod_base = OTHER; note = 2'-deoxy-2'-fluoroadenosine-3'-phosphate
  modified_base 9: mod_base = OTHER; note = 2'-deoxy-2'-fluoroguanosine-3'-phosphate
  modified_base 10: mod_base = OTHER; note = 2'-O-methyladenosine-3'-phosphate
  modified_base 11: mod_base = OTHER; note = 2'-O-methylcytidine-3'-phosphate
  modified_base 12: mod_base = OTHER; note = 2'-O-methyladenosine-3'-phosphate
  modified_base 13: mod_base = OTHER; note = 2'-O-methylguanosine-3'-phosphate
  modified_base 14: mod_base = OTHER; note = 2'-deoxy-2'-fluoroadenosine-3'-phosphate
  modified_base 15: mod_base = OTHER; note = 2'-O-methyladenosine-3'-phosphate
  modified_base 16: mod_base = OTHER; note = 2'-deoxy-2'-fluoroguanosine-3'-phosphate
  modified_base 17: mod_base = OTHER; note = 2'-O-methyluridine-3'-phosphate
  modified_base 18: mod_base = OTHER; note = 2'-O-methylcytidine-3'-phosphate
  modified_base 19: mod_base = OTHER; note = 2'-O-methylcytidine-3'-phosphate
  modified_base 20: mod_base = OTHER; note = 2'-O-methylcytidine-3'-phosphate
  modified_base 21: mod_base = OTHER; note = 2'-O-methyluridine-3'-phosphorothioate
  modified_base 22: mod_base = OTHER; note = 2'-O-methyladenosine-3'-phosphorothioate
  modified_base 23: mod_base = OTHER; note = 2'-O-methylcytidine
attgtgaagacagaagtccctac

SEQ ID NO: 1390 - RNA, 23 nt, synthetic construct
  source 1..23: mol_type = other RNA
  modified_base 1: mod_base = OTHER; note = 2'-O-methyladenosine-3'-phosphorothioate
  modified_base 2: mod_base = OTHER; note = 2'-deoxy-2'-fluoroadenosine-3'-phosphorothioate
  modified_base 3: mod_base = OTHER; note = 2'-O-methyladenosine-3'-phosphate
  modified_base 4: mod_base = OTHER; note = 2'-O-methyluridine-3'-phosphate
  modified_base 5: mod_base = OTHER; note = 2'-O-methyladenosine-3'-phosphate
  modified_base 6: mod_base = OTHER; note = 2'-deoxy-2'-fluoroadenosine-3'-phosphate
  modified_base 7: mod_base = OTHER; note = 2'-O-methyluridine-3'-phosphate
  modified_base 8: mod_base = OTHER; note = 2'-deoxy-2'-fluorocytidine-3'-phosphate
  modified_base 9: mod_base = OTHER; note = 2'-deoxy-2'-fluorouridine-3'-phosphate
  modified_base 10: mod_base = OTHER; note = 2'-O-methylguanosine-3'-phosphate
  modified_base 11: mod_base = OTHER; note = 2'-O-methyluridine-3'-phosphate
  modified_base 12: mod_base = OTHER; note = 2'-O-methyluridine-3'-phosphate
  modified_base 13: mod_base = OTHER; note = 2'-O-methylguanosine-3'-phosphate
  modified_base 14: mod_base = OTHER; note = 2'-deoxy-2'-fluorouridine-3'-phosphate
  modified_base 15: mod_base = OTHER; note = 2'-O-methylguanosine-3'-phosphate
  modified_base 16: mod_base = OTHER; note = 2'-deoxy-2'-fluoroadenosine-3'-phosphate
  modified_base 17: mod_base = OTHER; note = 2'-O-methyladenosine-3'-phosphate
  modified_base 18: mod_base = OTHER; note = 2'-O-methylguanosine-3'-phosphate
  modified_base 19: mod_base = OTHER; note = 2'-O-methyladenosine-3'-phosphate
  modified_base 20: mod_base = OTHER; note = 2'-O-methylcytidine-3'-phosphate
  modified_base 21: mod_base = OTHER; note = 2'-O-methyladenosine-3'-phosphorothioate
  modified_base 22: mod_base = OTHER; note = 2'-O-methylguanosine-3'-phosphorothioate
  modified_base 23: mod_base = OTHER; note = 2'-O-methyladenosine
aaataatctgttgtgaagacaga

SEQ ID NO: 1391 - RNA, 23 nt, synthetic construct
  source 1..23: mol_type = other RNA
  modified_base 1: mod_base = OTHER; note = 2'-O-methyladenosine-3'-phosphorothioate
  modified_base 2: mod_base = OTHER; note = 2'-deoxy-2'-fluoroguanosine-3'-phosphorothioate
  modified_base 3: mod_base = OTHER; note = 2'-O-methyluridine-3'-phosphate
  modified_base 4: mod_base = OTHER; note = 2'-O-methyladenosine-3'-phosphate
  modified_base 5: mod_base = OTHER; note = 2'-O-methyladenosine-3'-phosphate
  modified_base 6: mod_base = OTHER; note = 2'-deoxy-2'-fluoroguanosine-3'-phosphate
  modified_base 7: mod_base = OTHER; note = 2'-O-methylguanosine-3'-phosphate
  modified_base 8: mod_base = OTHER; note = 2'-deoxy-2'-fluorouridine-3'-phosphate
  modified_base 9: mod_base = OTHER; note = 2'-deoxy-2'-fluoroadenosine-3'-phosphate
  modified_base 10: mod_base = OTHER; note = 2'-O-methyladenosine-3'-phosphate
  modified_base 11: mod_base = OTHER; note = 2'-O-methyluridine-3'-phosphate
  modified_base 12: mod_base = OTHER; note = 2'-O-methyladenosine-3'-phosphate
  modified_base 13: mod_base = OTHER; note = 2'-O-methyladenosine-3'-phosphate
  modified_base 14: mod_base = OTHER; note = 2'-deoxy-2'-fluorouridine-3'-phosphate
  modified_base 15: mod_base = OTHER; note = 2'-O-methylcytidine-3'-phosphate
  modified_base 16: mod_base = OTHER; note = 2'-deoxy-2'-fluorouridine-3'-phosphate
  modified_base 17: mod_base = OTHER; note = 2'-O-methylguanosine-3'-phosphate
  modified_base 18: mod_base = OTHER; note = 2'-O-methyluridine-3'-phosphate
  modified_base 19: mod_base = OTHER; note = 2'-O-methyluridine-3'-phosphate
  modified_base 20: mod_base = OTHER; note = 2'-O-methylguanosine-3'-phosphate
  modified_base 21: mod_base = OTHER; note = 2'-O-methyluridine-3'-phosphorothioate
  modified_base 22: mod_base = OTHER; note = 2'-O-methylguanosine-3'-phosphorothioate
  modified_base 23: mod_base = OTHER; note = 2'-O-methyladenosine
agtaaggtaataatctgttgtga

SEQ ID NO: 1392 - RNA, 23 nt, synthetic construct
  source 1..23: mol_type = other RNA
  modified_base 1: mod_base = OTHER; note = 2'-O-methyladenosine-3'-phosphorothioate
  modified_base 2: mod_base = OTHER; note = 2'-deoxy-2'-fluoroadenosine-3'-phosphorothioate
  modified_base 3: mod_base = OTHER; note = 2'-O-methyladenosine-3'-phosphate
  modified_base 4: mod_base = OTHER; note = 2'-O-methylcytidine-3'-phosphate
  modified_base 5: mod_base = OTHER; note = 2'-O-methyluridine-3'-phosphate
  modified_base 6: mod_base = OTHER; note = 2'-deoxy-2'-fluorouridine-3'-phosphate
  modified_base 7: mod_base = OTHER; note = 2'-O-methylcytidine-3'-phosphate
  modified_base 8: mod_base = OTHER; note = 2'-deoxy-2'-fluorouridine-3'-phosphate
  modified_base 9: mod_base = OTHER; note = 2'-deoxy-2'-fluoroguanosine-3'-phosphate
  modified_base 10: mod_base = OTHER; note = 2'-O-methyluridine-3'-phosphate
  modified_base 11: mod_base = OTHER; note = 2'-O-methyladenosine-3'-phosphate
  modified_base 12: mod_base = OTHER; note = 2'-O-methyladenosine-3'-phosphate
  modified_base 13: mod_base = OTHER; note = 2'-O-methylguanosine-3'-phosphate
  modified_base 14: mod_base = OTHER; note = 2'-deoxy-2'-fluoroguanosine-3'-phosphate
  modified_base 15: mod_base = OTHER; note = 2'-O-methyluridine-3'-phosphate
  modified_base 16: mod_base = OTHER; note = 2'-deoxy-2'-fluoroadenosine-3'-phosphate
  modified_base 17: mod_base = OTHER; note = 2'-O-methyladenosine-3'-phosphate
  modified_base 18: mod_base = OTHER; note = 2'-O-methyluridine-3'-phosphate
  modified_base 19: mod_base = OTHER; note = 2'-O-methyladenosine-3'-phosphate
  modified_base 20: mod_base = OTHER; note = 2'-O-methyladenosine-3'-phosphate
  modified_base 21: mod_base = OTHER; note = 2'-O-methyluridine-3'-phosphorothioate
  modified_base 22: mod_base = OTHER; note = 2'-O-methylcytidine-3'-phosphorothioate
  modified_base 23: mod_base = OTHER; note = 2'-O-methyluridine
aaacttctgtaaggtaataatct

SEQ ID NO: 1393 - RNA, 23 nt, synthetic construct
  source 1..23: mol_type = other RNA
  modified_base 1: mod_base = OTHER; note = 2'-O-methyladenosine-3'-phosphorothioate
  modified_base 2: mod_base = OTHER; note = 2'-deoxy-2'-fluoroadenosine-3'-phosphorothioate
  modified_base 3: mod_base = OTHER; note = 2'-O-methyladenosine-3'-phosphate
  modified_base 4: mod_base = OTHER; note = 2'-O-methyluridine-3'-phosphate
  modified_base 5: mod_base = OTHER; note = 2'-O-methyluridine-3'-phosphate
  modified_base 6: mod_base = OTHER; note = 2'-deoxy-2'-fluorocytidine-3'-phosphate
  modified_base 7: mod_base = OTHER; note = 2'-O-methyladenosine-3'-phosphate
  modified_base 8: mod_base = OTHER; note = 2'-deoxy-2'-fluoroadenosine-3'-phosphate
  modified_base 9: mod_base = OTHER; note = 2'-deoxy-2'-fluoroadenosine-3'-phosphate
  modified_base 10: mod_base = OTHER; note = 2'-O-methylcytidine-3'-phosphate
  modified_base 11: mod_base = OTHER; note = 2'-O-methyluridine-3'-phosphate
  modified_base 12: mod_base = OTHER; note = 2'-O-methyluridine-3'-phosphate
  modified_base 13: mod_base = OTHER; note = 2'-O-methylcytidine-3'-phosphate
  modified_base 14: mod_base = OTHER; note = 2'-deoxy-2'-fluorouridine-3'-phosphate
  modified_base 15: mod_base = OTHER; note = 2'-O-methylguanosine-3'-phosphate
  modified_base 16: mod_base = OTHER; note = 2'-deoxy-2'-fluorouridine-3'-phosphate
  modified_base 17: mod_base = OTHER; note = 2'-O-methyladenosine-3'-phosphate
  modified_base 18: mod_base = OTHER; note = 2'-O-methyladenosine-3'-phosphate
  modified_base 19: mod_base = OTHER; note = 2'-O-methylguanosine-3'-phosphate
  modified_base 20: mod_base = OTHER; note = 2'-O-methylguanosine-3'-phosphate
  modified_base 21: mod_base = OTHER; note = 2'-O-methyluridine-3'-phosphorothioate
  modified_base 22: mod_base = OTHER; note = 2'-O-methyladenosine-3'-phosphorothioate
  modified_base 23: mod_base = OTHER; note = 2'-O-methyladenosine
aaattcaaacttctgtaaggtaa

SEQ ID NO: 1394 - RNA, 23 nt, synthetic construct
  source 1..23: mol_type = other RNA
  modified_base 1: mod_base = OTHER; note = 2'-O-methyladenosine-3'-phosphorothioate
  modified_base 2: mod_base = OTHER; note = 2'-deoxy-2'-fluoroadenosine-3'-phosphorothioate
  modified_base 3: mod_base = OTHER; note = 2'-O-methylcytidine-3'-phosphate
  modified_base 4: mod_base = OTHER; note = 2'-O-methylcytidine-3'-phosphate
  modified_base 5: mod_base = OTHER; note = 2'-O-methylguanosine-3'-phosphate
  modified_base 6: mod_base = OTHER; note = 2'-deoxy-2'-fluoroguanosine-3'-phosphate
  modified_base 7: mod_base = OTHER; note = 2'-O-methyladenosine-3'-phosphate
  modified_base 8: mod_base = OTHER; note = 2'-deoxy-2'-fluorouridine-3'-phosphate
  modified_base 9: mod_base = OTHER; note = 2'-deoxy-2'-fluoroadenosine-3'-phosphate
  modified_base 10: mod_base = OTHER; note = 2'-O-methyladenosine-3'-phosphate
  modified_base 11: mod_base = OTHER; note = 2'-O-methyluridine-3'-phosphate
  modified_base 12: mod_base = OTHER; note = 2'-O-methyluridine-3'-phosphate
  modified_base 13: mod_base = OTHER; note = 2'-O-methylcytidine-3'-phosphate
  modified_base 14: mod_base = OTHER; note = 2'-deoxy-2'-fluoroadenosine-3'-phosphate
  modified_base 15: mod_base = OTHER; note = 2'-O-methyladenosine-3'-phosphate
  modified_base 16: mod_base = OTHER; note = 2'-deoxy-2'-fluoroadenosine-3'-phosphate
  modified_base 17: mod_base = OTHER; note = 2'-O-methylcytidine-3'-phosphate
  modified_base 18: mod_base = OTHER; note = 2'-O-methyluridine-3'-phosphate
  modified_base 19: mod_base = OTHER; note = 2'-O-methyluridine-3'-phosphate
  modified_base 20: mod_base = OTHER; note = 2'-O-methylcytidine-3'-phosphate
  modified_base 21: mod_base = OTHER; note = 2'-O-methyluridine-3'-phosphorothioate
  modified_base 22: mod_base = OTHER; note = 2'-O-methylguanosine-3'-phosphorothioate
  modified_base 23: mod_base = OTHER; note = 2'-O-methyluridine
aaccggataattcaaacttctgt

SEQ ID NO: 1395 - RNA, 23 nt, synthetic construct
  source 1..23: mol_type = other RNA
  modified_base 1: mod_base = OTHER; note = 2'-O-methyladenosine-3'-phosphorothioate
  modified_base 2: mod_base = OTHER; note = 2'-deoxy-2'-fluoroadenosine-3'-phosphorothioate
  modified_base 3: mod_base = OTHER; note = 2'-O-methyladenosine-3'-phosphate
  modified_base 4: mod_base = OTHER; note = 2'-O-methylcytidine-3'-phosphate
  modified_base 5: mod_base = OTHER; note = 2'-O-methylcytidine-3'-phosphate
  modified_base 6: mod_base = OTHER; note = 2'-deoxy-2'-fluorocytidine-3'-phosphate
  modified_base 7: mod_base = OTHER; note = 2'-O-methylguanosine-3'-phosphate
  modified_base 8: mod_base = OTHER; note = 2'-deoxy-2'-fluoroadenosine-3'-phosphate
  modified_base 9: mod_base = OTHER; note = 2'-deoxy-2'-fluorocytidine-3'-phosphate
  modified_base 10: mod_base = OTHER; note = 2'-O-methylcytidine-3'-phosphate
  modified_base 11: mod_base = OTHER; note = 2'-O-methylguanosine-3'-phosphate
  modified_base 12: mod_base = OTHER; note = 2'-O-methylguanosine-3'-phosphate
  modified_base 13: mod_base = OTHER; note = 2'-O-methyladenosine-3'-phosphate
  modified_base 14: mod_base = OTHER; note = 2'-deoxy-2'-fluorouridine-3'-phosphate
  modified_base 15: mod_base = OTHER; note = 2'-O-methyladenosine-3'-phosphate
  modified_base 16: mod_base = OTHER; note = 2'-deoxy-2'-fluoroadenosine-3'-phosphate
  modified_base 17: mod_base = OTHER; note = 2'-O-methyluridine-3'-phosphate
  modified_base 18: mod_base = OTHER; note = 2'-O-methyluridine-3'-phosphate
  modified_base 19: mod_base = OTHER; note = 2'-O-methylcytidine-3'-phosphate
  modified_base 20: mod_base = OTHER; note = 2'-O-methyladenosine-3'-phosphate
  modified_base 21: mod_base = OTHER; note = 2'-O-methyladenosine-3'-phosphorothioate
  modified_base 22: mod_base = OTHER; note = 2'-O-methyladenosine-3'-phosphorothioate
  modified_base 23: mod_base = OTHER; note = 2'-O-methylcytidine
aaacccgaccggataattcaaac

SEQ ID NO: 1396 - RNA, 23 nt, synthetic construct
  source 1..23: mol_type = other RNA
  modified_base 1: mod_base = OTHER; note = 2'-O-methyladenosine-3'-phosphorothioate
  modified_base 2: mod_base = OTHER; note = 2'-deoxy-2'-fluoroadenosine-3'-phosphorothioate
  modified_base 3: mod_base = OTHER; note = 2'-O-methylcytidine-3'-phosphate
  modified_base 4: mod_base = OTHER; note = 2'-O-methyladenosine-3'-phosphate
  modified_base 5: mod_base = OTHER; note = 2'-O-methyladenosine-3'-phosphate
  modified_base 6: mod_base = OTHER; note = 2'-deoxy-2'-fluorouridine-3'-phosphate
  modified_base 7: mod_base = OTHER; note = 2'-O-methyladenosine-3'-phosphate
  modified_base 8: mod_base = OTHER; note = 2'-deoxy-2'-fluoroadenosine-3'-phosphate
  modified_base 9: mod_base = OTHER; note = 2'-deoxy-2'-fluoroadenosine-3'-phosphate
  modified_base 10: mod_base = OTHER; note = 2'-O-methyladenosine-3'-phosphate
  modified_base 11: mod_base = OTHER; note = 2'-O-methylcytidine-3'-phosphate
  modified_base 12: mod_base = OTHER; note = 2'-O-methylcytidine-3'-phosphate
  modified_base 13: mod_base = OTHER; note = 2'-O-methylcytidine-3'-phosphate
  modified_base 14: mod_base = OTHER; note = 2'-deoxy-2'-fluoroguanosine-3'-phosphate
  modified_base 15: mod_base = OTHER; note = 2'-O-methyladenosine-3'-phosphate
  modified_base 16: mod_base = OTHER; note = 2'-deoxy-2'-fluorocytidine-3'-phosphate
  modified_base 17: mod_base = OTHER; note = 2'-O-methylcytidine-3'-phosphate
  modified_base 18: mod_base = OTHER; note = 2'-O-methylguanosine-3'-phosphate
  modified_base 19: mod_base = OTHER; note = 2'-O-methylguanosine-3'-phosphate
  modified_base 20: mod_base = OTHER; note = 2'-O-methyladenosine-3'-phosphate
  modified_base 21: mod_base = OTHER; note = 2'-O-methyluridine-3'-phosphorothioate
  modified_base 22: mod_base = OTHER; note = 2'-O-methyladenosine-3'-phosphorothioate
  modified_base 23: mod_base = OTHER; note = 2'-O-methyladenosine
aacaataaaacccgaccggataa

SEQ ID NO: 1397 - RNA, 23 nt, synthetic construct
  source 1..23: mol_type = other RNA
  modified_base 1: mod_base = OTHER; note = 2'-O-methyladenosine-3'-phosphorothioate
  modified_base 2: mod_base = OTHER; note = 2'-deoxy-2'-fluorouridine-3'-phosphorothioate
  modified_base 3: mod_base = OTHER; note = 2'-O-methyluridine-3'-phosphate
  modified_base 4: mod_base = OTHER; note = 2'-O-methyluridine-3'-phosphate
  modified_base 5: mod_base = OTHER; note = 2'-O-methyluridine-3'-phosphate
  modified_base 6: mod_base = OTHER; note = 2'-deoxy-2'-fluoroadenosine-3'-phosphate
  modified_base 7: mod_base = OTHER; note = 2'-O-methyladenosine-3'-phosphate
  modified_base 8: mod_base = OTHER; note = 2'-deoxy-2'-fluoroadenosine-3'-phosphate
  modified_base 9: mod_base = OTHER; note = 2'-deoxy-2'-fluorocytidine-3'-phosphate
  modified_base 10: mod_base = OTHER; note = 2'-O-methyladenosine-3'-phosphate
  modified_base 11: mod_base = OTHER; note = 2'-O-methyladenosine-3'-phosphate
  modified_base 12: mod_base = OTHER; note = 2'-O-methyluridine-3'-phosphate
  modified_base 13: mod_base = OTHER; note = 2'-O-methyladenosine-3'-phosphate
  modified_base 14: mod_base = OTHER; note = 2'-deoxy-2'-fluoroadenosine-3'-phosphate
  modified_base 15: mod_base = OTHER; note = 2'-O-methyladenosine-3'-phosphate
  modified_base 16: mod_base = OTHER; note = 2'-deoxy-2'-fluoroadenosine-3'-phosphate
  modified_base 17: mod_base = OTHER; note = 2'-O-methylcytidine-3'-phosphate
  modified_base 18: mod_base = OTHER; note = 2'-O-methylcytidine-3'-phosphate
  modified_base 19: mod_base = OTHER; note = 2'-O-methylcytidine-3'-phosphate
  modified_base 20: mod_base = OTHER; note = 2'-O-methylguanosine-3'-phosphate
  modified_base 21: mod_base = OTHER; note = 2'-O-methyladenosine-3'-phosphorothioate
  modified_base 22: mod_base = OTHER; note = 2'-O-methylcytidine-3'-phosphorothioate
  modified_base 23: mod_base = OTHER; note = 2'-O-methylcytidine
attttaaacaataaaacccgacc

SEQ ID NO: 1398 - RNA, 23 nt, synthetic construct
  source 1..23: mol_type = other RNA
  modified_base 1: mod_base = OTHER; note = 2'-O-methyladenosine-3'-phosphorothioate
  modified_base 2: mod_base = OTHER; note = 2'-deoxy-2'-fluoroguanosine-3'-phosphorothioate
  modified_base 3: mod_base = OTHER; note = 2'-O-methyladenosine-3'-phosphate
  modified_base 4: mod_base = OTHER; note = 2'-O-methyluridine-3'-phosphate
  modified_base 5: mod_base = OTHER; note = 2'-O-methylguanosine-3'-phosphate
  modified_base 6: mod_base = OTHER; note = 2'-deoxy-2'-fluorocytidine-3'-phosphate
  modified_base 7: mod_base = OTHER; note = 2'-O-methyladenosine-3'-phosphate
  modified_base 8: mod_base = OTHER; note = 2'-deoxy-2'-fluoroguanosine-3'-phosphate
  modified_base 9: mod_base = OTHER; note = 2'-deoxy-2'-fluoroadenosine-3'-phosphate
  modified_base 10: mod_base = OTHER; note = 2'-O-methyladenosine-3'-phosphate
  modified_base 11: mod_base = OTHER; note = 2'-O-methyladenosine-3'-phosphate
  modified_base 12: mod_base = OTHER; note = 2'-O-methyluridine-3'-phosphate
  modified_base 13: mod_base = OTHER; note = 2'-O-methylguanosine-3'-phosphate
  modified_base 14: mod_base = OTHER; note = 2'-deoxy-2'-fluoroadenosine-3'-phosphate
  modified_base 15: mod_base = OTHER; note = 2'-O-methyluridine-3'-phosphate
  modified_base 16: mod_base = OTHER; note = 2'-deoxy-2'-fluorouridine-3'-phosphate
  modified_base 17: mod_base = OTHER; note = 2'-O-methyluridine-3'-phosphate
  modified_base 18: mod_base = OTHER; note = 2'-O-methyluridine-3'-phosphate
  modified_base 19: mod_base = OTHER; note = 2'-O-methyladenosine-3'-phosphate
  modified_base 20: mod_base = OTHER; note = 2'-O-methyladenosine-3'-phosphate
  modified_base 21: mod_base = OTHER; note = 2'-O-methyladenosine-3'-phosphorothioate
  modified_base 22: mod_base = OTHER; note = 2'-O-methylcytidine-3'-phosphorothioate
  modified_base 23: mod_base = OTHER; note = 2'-O-methyladenosine
agatgcagaaatgattttaaaca

SEQ ID NO: 1399 - RNA, 23 nt, synthetic construct
  source 1..23: mol_type = other RNA
  modified_base 1: mod_base = OTHER; note = 2'-O-methyladenosine-3'-phosphorothioate
  modified_base 2: mod_base = OTHER; note = 2'-deoxy-2'-fluoroadenosine-3'-phosphorothioate
  modified_base 3: mod_base = OTHER; note = 2'-O-methylguanosine-3'-phosphate
  modified_base 4: mod_base = OTHER; note = 2'-O-methylcytidine-3'-phosphate
  modified_base 5: mod_base = OTHER; note = 2'-O-methyladenosine-3'-phosphate
  modified_base 6: mod_base = OTHER; note = 2'-deoxy-2'-fluoroguanosine-3'-phosphate
  modified_base 7: mod_base = OTHER; note = 2'-O-methylcytidine-3'-phosphate
  modified_base 8: mod_base = OTHER; note = 2'-deoxy-2'-fluorouridine-3'-phosphate
  modified_base 9: mod_base = OTHER; note = 2'-deoxy-2'-fluoroguanosine-3'-phosphate
  modified_base 10: mod_base = OTHER; note = 2'-O-methyladenosine-3'-phosphate
  modified_base 11: mod_base = OTHER; note = 2'-O-methyluridine-3'-phosphate
  modified_base 12: mod_base = OTHER; note = 2'-O-methylguanosine-3'-phosphate
  modified_base 13: mod_base = OTHER; note = 2'-O-methylcytidine-3'-phosphate
  modified_base 14: mod_base = OTHER; note = 2'-deoxy-2'-fluoroadenosine-3'-phosphate
  modified_base 15: mod_base = OTHER; note = 2'-O-methylguanosine-3'-phosphate
  modified_base 16: mod_base = OTHER; note = 2'-deoxy-2'-fluoroadenosine-3'-phosphate
  modified_base 17: mod_base = OTHER; note = 2'-O-methyladenosine-3'-phosphate
  modified_base 18: mod_base = OTHER; note = 2'-O-methyladenosine-3'-phosphate
  modified_base 19: mod_base = OTHER; note = 2'-O-methyluridine-3'-phosphate
  modified_base 20: mod_base = OTHER; note = 2'-O-methylguanosine-3'-phosphate
  modified_base 21: mod_base = OTHER; note = 2'-O-methyladenosine-3'-phosphorothioate
  modified_base 22: mod_base = OTHER; note = 2'-O-methyluridine-3'-phosphorothioate
  modified_base 23: mod_base = OTHER; note = 2'-O-methyluridine
aagcagctgatgcagaaatgatt

SEQ ID NO: 1400 - RNA, 23 nt, synthetic construct
  source 1..23: mol_type = other RNA
  modified_base 1: mod_base = OTHER; note = 2'-O-methyladenosine-3'-phosphorothioate
  modified_base 2: mod_base = OTHER; note = 2'-deoxy-2'-fluorouridine-3'-phosphorothioate
  modified_base 3: mod_base = OTHER; note = 2'-O-methylguanosine-3'-phosphate
  modified_base 4: mod_base = OTHER; note = 2'-O-methyluridine-3'-phosphate
  modified_base 5: mod_base = OTHER; note = 2'-O-methyluridine-3'-phosphate
  modified_base 6: mod_base = OTHER; note = 2'-deoxy-2'-fluorouridine-3'-phosphate
  modified_base 7: mod_base = OTHER; note = 2'-O-methylcytidine-3'-phosphate
  modified_base 8: mod_base = OTHER; note = 2'-deoxy-2'-fluoroadenosine-3'-phosphate
  modified_base 9: mod_base = OTHER; note = 2'-deoxy-2'-fluoroguanosine-3'-phosphate
  modified_base 10: mod_base = OTHER; note = 2'-O-methylcytidine-3'-phosphate
  modified_base 11: mod_base = OTHER; note = 2'-O-methyladenosine-3'-phosphate
  modified_base 12: mod_base = OTHER; note = 2'-O-methylguanosine-3'-phosphate
  modified_base 13: mod_base = OTHER; note = 2'-O-methylcytidine-3'-phosphate
  modified_base 14: mod_base = OTHER; note = 2'-deoxy-2'-fluorouridine-3'-phosphate
  modified_base 15: mod_base = OTHER; note = 2'-O-methylguanosine-3'-phosphate
  modified_base 16: mod_base = OTHER; note = 2'-deoxy-2'-fluoroadenosine-3'-phosphate
  modified_base 17: mod_base = OTHER; note = 2'-O-methyluridine-3'-phosphate
  modified_base 18: mod_base = OTHER; note = 2'-O-methylguanosine-3'-phosphate
  modified_base 19: mod_base = OTHER; note = 2'-O-methylcytidine-3'-phosphate
  modified_base 20: mod_base = OTHER; note = 2'-O-methyladenosine-3'-phosphate
  modified_base 21: mod_base = OTHER; note = 2'-O-methylguanosine-3'-phosphorothioate
  modified_base 22: mod_base = OTHER; note = 2'-O-methyladenosine-3'-phosphorothioate
  modified_base 23: mod_base = OTHER; note = 2'-O-methyladenosine
atgtttcagcagctgatgcagaa

SEQ ID NO: 1401 - RNA, 23 nt, synthetic construct
  source 1..23: mol_type = other RNA
  modified_base 1: mod_base = OTHER; note = 2'-O-methyladenosine-3'-phosphorothioate
  modified_base 2: mod_base = OTHER; note = 2'-deoxy-2'-fluoroadenosine-3'-phosphorothioate
  modified_base 3: mod_base = OTHER; note = 2'-O-methyluridine-3'-phosphate
  modified_base 4: mod_base = OTHER; note = 2'-O-methyluridine-3'-phosphate
  modified_base 5: mod_base = OTHER; note = 2'-O-methyluridine-3'-phosphate
  modified_base 6: mod_base = OTHER; note = 2'-deoxy-2'-fluoroguanosine-3'-phosphate
  modified_base 7: mod_base = OTHER; note = 2'-O-methyluridine-3'-phosphate
  modified_base 8: mod_base = OTHER; note = 2'-deoxy-2'-fluorouridine-3'-phosphate
  modified_base 9: mod_base = OTHER; note = 2'-deoxy-2'-fluoroguanosine-3'-phosphate
  modified_base 10: mod_base = OTHER; note = 2'-O-methyluridine-3'-phosphate
  modified_base 11: mod_base = OTHER; note = 2'-O-methyluridine-3'-phosphate
  modified_base 12: mod_base = OTHER; note = 2'-O-methyluridine-3'-phosphate
  modified_base 13: mod_base = OTHER; note = 2'-O-methylcytidine-3'-phosphate
  modified_base 14: mod_base = OTHER; note = 2'-deoxy-2'-fluoroadenosine-3'-phosphate
  modified_base 15: mod_base = OTHER; note = 2'-O-methylguanosine-3'-phosphate
  modified_base 16: mod_base = OTHER; note = 2'-deoxy-2'-fluorocytidine-3'-phosphate
  modified_base 17: mod_base = OTHER; note = 2'-O-methyladenosine-3'-phosphate
  modified_base 18: mod_base = OTHER; note = 2'-O-methylguanosine-3'-phosphate
  modified_base 19: mod_base = OTHER; note = 2'-O-methylcytidine-3'-phosphate
  modified_base 20: mod_base = OTHER; note = 2'-O-methyluridine-3'-phosphate
  modified_base 21: mod_base = OTHER; note = 2'-O-methylguanosine-3'-phosphorothioate
  modified_base 22: mod_base = OTHER; note = 2'-O-methyladenosine-3'-phosphorothioate
  modified_base 23: mod_base = OTHER; note = 2'-O-methyluridine
aatttgttgtttcagcagctgat

SEQ ID NO: 1402 - RNA, 23 nt, synthetic construct
  source 1..23: mol_type = other RNA
  modified_base 1: mod_base = OTHER; note = 2'-O-methyladenosine-3'-phosphorothioate
  modified_base 2: mod_base = OTHER; note = 2'-deoxy-2'-fluoroadenosine-3'-phosphorothioate
  modified_base 3: mod_base = OTHER; note = 2'-O-methylcytidine-3'-phosphate
  modified_base 4: mod_base = OTHER; note = 2'-O-methyladenosine-3'-phosphate
  modified_base 5: mod_base = OTHER; note = 2'-O-methyladenosine-3'-phosphate
  modified_base 6: mod_base = OTHER; note = 2'-deoxy-2'-fluorouridine-3'-phosphate
  modified_base 7: mod_base = OTHER; note = 2'-O-methyluridine-3'-phosphate
  modified_base 8: mod_base = OTHER; note = 2'-deoxy-2'-fluorocytidine-3'-phosphate
  modified_base 9: mod_base = OTHER; note = 2'-deoxy-2'-fluorocytidine-3'-phosphate
  modified_base 10: mod_base = OTHER; note = 2'-O-methyluridine-3'-phosphate
  modified_base 11: mod_base = OTHER; note = 2'-O-methyladenosine-3'-phosphate
  modified_base 12: mod_base = OTHER; note = 2'-O-methyluridine-3'-phosphate
  modified_base 13: mod_base = OTHER; note = 2'-O-methyluridine-3'-phosphate
  modified_base 14: mod_base = OTHER; note = 2'-deoxy-2'-fluorouridine-3'-phosphate
  modified_base 15: mod_base = OTHER; note = 2'-O-methylguanosine-3'-phosphate
  modified_base 16: mod_base = OTHER; note = 2'-deoxy-2'-fluorouridine-3'-phosphate
  modified_base 17: mod_base = OTHER; note = 2'-O-methyluridine-3'-phosphate
  modified_base 18: mod_base = OTHER; note = 2'-O-methylguanosine-3'-phosphate
  modified_base 19: mod_base = OTHER; note = 2'-O-methyluridine-3'-phosphate
  modified_base 20: mod_base = OTHER; note = 2'-O-methyluridine-3'-phosphate
  modified_base 21: mod_base = OTHER; note = 2'-O-methyluridine-3'-phosphorothioate
  modified_base 22: mod_base = OTHER; note = 2'-O-methylcytidine-3'-phosphorothioate
  modified_base 23: mod_base = OTHER; note = 2'-O-methyladenosine
aacaattcctatttgttgtttca

SEQ ID NO: 1403 - RNA, 23 nt, synthetic construct
  source 1..23: mol_type = other RNA
  modified_base 1: mod_base = OTHER; note = 2'-O-methyladenosine-3'-phosphorothioate
  modified_base 2: mod_base = OTHER; note = 2'-deoxy-2'-fluorocytidine-3'-phosphorothioate
  modified_base 3: mod_base = OTHER; note = 2'-O-methylcytidine-3'-phosphate
  modified_base 4: mod_base = OTHER; note = 2'-O-methyluridine-3'-phosphate
  modified_base 5: mod_base = OTHER; note = 2'-O-methylcytidine-3'-phosphate
  modified_base 6: mod_base = OTHER; note = 2'-deoxy-2'-fluorocytidine-3'-phosphate
  modified_base 7: mod_base = OTHER; note = 2'-O-methyladenosine-3'-phosphate
  modified_base 8: mod_base = OTHER; note = 2'-deoxy-2'-fluorouridine-3'-phosphate
  modified_base 9: mod_base = OTHER; note = 2'-deoxy-2'-fluoroadenosine-3'-phosphate
  modified_base 10: mod_base = OTHER; note = 2'-O-methyladenosine-3'-phosphate
  modified_base 11: mod_base = OTHER; note = 2'-O-methyladenosine-3'-phosphate
  modified_base 12: mod_base = OTHER; note = 2'-O-methyladenosine-3'-phosphate
  modified_base 13: mod_base = OTHER; note = 2'-O-methyladenosine-3'-phosphate
  modified_base 14: mod_base = OTHER; note = 2'-deoxy-2'-fluorocytidine-3'-phosphate
  modified_base 15: mod_base = OTHER; note = 2'-O-methyladenosine-3'-phosphate
  modified_base 16: mod_base = OTHER; note = 2'-deoxy-2'-fluoroadenosine-3'-phosphate
  modified_base 17: mod_base = OTHER; note = 2'-O-methyluridine-3'-phosphate
  modified_base 18: mod_base = OTHER; note = 2'-O-methyluridine-3'-phosphate
  modified_base 19: mod_base = OTHER; note = 2'-O-methylcytidine-3'-phosphate
  modified_base 20: mod_base = OTHER; note = 2'-O-methylcytidine-3'-phosphate
  modified_base 21: mod_base = OTHER; note = 2'-O-methyluridine-3'-phosphorothioate
  modified_base 22: mod_base = OTHER; note = 2'-O-methyladenosine-3'-phosphorothioate
  modified_base 23: mod_base = OTHER; note = 2'-O-methyluridine
acctccataaaaacaattcctat

SEQ ID NO: 1404 - RNA, 23 nt, synthetic construct
  source 1..23: mol_type = other RNA
  modified_base 1: mod_base = OTHER; note = 2'-O-methyladenosine-3'-phosphorothioate
  modified_base 2: mod_base = OTHER; note = 2'-deoxy-2'-fluorouridine-3'-phosphorothioate
  modified_base 3: mod_base = OTHER; note = 2'-O-methylguanosine-3'-phosphate
  modified_base 4: mod_base = OTHER; note = 2'-O-methylcytidine-3'-phosphate
  modified_base 5: mod_base = OTHER; note = 2'-O-methyladenosine-3'-phosphate
  modified_base 6: mod_base = OTHER; note = 2'-deoxy-2'-fluoroadenosine-3'-phosphate
  modified_base 7: mod_base = OTHER; note = 2'-O-methyladenosine-3'-phosphate
  modified_base 8: mod_base = OTHER; note = 2'-deoxy-2'-fluoroguanosine-3'-phosphate
  modified_base 9: mod_base = OTHER; note = 2'-deoxy-2'-fluorocytidine-3'-phosphate
  modified_base 10: mod_base = OTHER; note = 2'-O-methylcytidine-3'-phosphate
  modified_base 11: mod_base = OTHER; note = 2'-O-methyluridine-3'-phosphate
  modified_base 12: mod_base = OTHER; note = 2'-O-methylcytidine-3'-phosphate
  modified_base 13: mod_base = OTHER; note = 2'-O-methylcytidine-3'-phosphate
  modified_base 14: mod_base = OTHER; note = 2'-deoxy-2'-fluoroadenosine-3'-phosphate
  modified_base 15: mod_base = OTHER; note = 2'-O-methyluridine-3'-phosphate
  modified_base 16: mod_base = OTHER; note = 2'-deoxy-2'-fluoroadenosine-3'-phosphate
  modified_base 17: mod_base = OTHER; note = 2'-O-methyladenosine-3'-phosphate
  modified_base 18: mod_base = OTHER; note = 2'-O-methyladenosine-3'-phosphate
  modified_base 19: mod_base = OTHER; note = 2'-O-methyladenosine-3'-phosphate
  modified_base 20: mod_base = OTHER; note = 2'-O-methyladenosine-3'-phosphate
  modified_base 21: mod_base = OTHER; note = 2'-O-methylcytidine-3'-phosphorothioate
  modified_base 22: mod_base = OTHER; note = 2'-O-methyladenosine-3'-phosphorothioate
  modified_base 23: mod_base = OTHER; note = 2'-O-methyladenosine
atgcaaagcctccataaaaacaa

SEQ ID NO: 1405 - RNA, 23 nt, synthetic construct
  source 1..23: mol_type = other RNA
  modified_base 1: mod_base = OTHER; note = 2'-O-methyladenosine-3'-phosphorothioate
  modified_base 2: mod_base = OTHER; note = 2'-deoxy-2'-fluoroadenosine-3'-phosphorothioate
  modified_base 3: mod_base = OTHER; note = 2'-O-methylguanosine-3'-phosphate
  modified_base 4: mod_base = OTHER; note = 2'-O-methylguanosine-3'-phosphate
  modified_base 5: mod_base = OTHER; note = 2'-O-methylguanosine-3'-phosphate
  modified_base 6: mod_base = OTHER; note = 2'-deoxy-2'-fluoroadenosine-3'-phosphate
  modified_base 7: mod_base = OTHER; note = 2'-O-methyladenosine-3'-phosphate
  modified_base 8: mod_base = OTHER; note = 2'-deoxy-2'-fluorouridine-3'-phosphate
  modified_base 9: mod_base = OTHER; note = 2'-deoxy-2'-fluorocytidine-3'-phosphate
  modified_base 10: mod_base = OTHER; note = 2'-O-methyluridine-3'-phosphate
  modified_base 11: mod_base = OTHER; note = 2'-O-methyladenosine-3'-phosphate
  modified_base 12: mod_base = OTHER; note = 2'-O-methyluridine-3'-phosphate
  modified_base 13: mod_base = OTHER; note = 2'-O-methylguanosine-3'-phosphate
  modified_base 14: mod_base = OTHER; note = 2'-deoxy-2'-fluorocytidine-3'-phosphate
  modified_base 15: mod_base = OTHER; note = 2'-O-methyladenosine-3'-phosphate
  modified_base 16: mod_base = OTHER; note = 2'-deoxy-2'-fluoroadenosine-3'-phosphate
  modified_base 17: mod_base = OTHER; note = 2'-O-methyladenosine-3'-phosphate
  modified_base 18: mod_base = OTHER; note = 2'-O-methylguanosine-3'-phosphate
  modified_base 19: mod_base = OTHER; note = 2'-O-methylcytidine-3'-phosphate
  modified_base 20: mod_base = OTHER; note = 2'-O-methylcytidine-3'-phosphate
  modified_base 21: mod_base = OTHER; note = 2'-O-methyluridine-3'-phosphorothioate
  modified_base 22: mod_base = OTHER; note = 2'-O-methylcytidine-3'-phosphorothioate
  modified_base 23: mod_base = OTHER; note = 2'-O-methylcytidine
aagggaatctatgcaaagcctcc

SEQ ID NO: 1406 - RNA, 23 nt, synthetic construct
  source 1..23: mol_type = other RNA
  modified_base 1: mod_base = OTHER; note = 2'-O-methyladenosine-3'-phosphorothioate
  modified_base 2: mod_base = OTHER; note = 2'-deoxy-2'-fluorocytidine-3'-phosphorothioate
  modified_base 3: mod_base = OTHER; note = 2'-O-methyluridine-3'-phosphate
  modified_base 4: mod_base = OTHER; note = 2'-O-methylguanosine-3'-phosphate
  modified_base 5: mod_base = OTHER; note = 2'-O-methylcytidine-3'-phosphate
  modified_base 6: mod_base = OTHER; note = 2'-deoxy-2'-fluorouridine-3'-phosphate
  modified_base 7: mod_base = OTHER; note = 2'-O-methylcytidine-3'-phosphate
  modified_base 8: mod_base = OTHER; note = 2'-deoxy-2'-fluoroadenosine-3'-phosphate
  modified_base 9: mod_base = OTHER; note = 2'-deoxy-2'-fluoroguanosine-3'-phosphate
  modified_base 10: mod_base = OTHER; note = 2'-O-methylguanosine-3'-phosphate
  modified_base 11: mod_base = OTHER; note = 2'-O-methylguanosine-3'-phosphate
  modified_base 12: mod_base = OTHER; note = 2'-O-methyladenosine-3'-phosphate
  modified_base 13: mod_base = OTHER; note = 2'-O-methyladenosine-3'-phosphate
  modified_base 14: mod_base = OTHER; note = 2'-deoxy-2'-fluorouridine-3'-phosphate
  modified_base 15: mod_base = OTHER; note = 2'-O-methylcytidine-3'-phosphate
  modified_base 16: mod_base = OTHER; note = 2'-deoxy-2'-fluorouridine-3'-phosphate
  modified_base 17: mod_base = OTHER; note = 2'-O-methyladenosine-3'-phosphate
  modified_base 18: mod_base = OTHER; note = 2'-O-methyluridine-3'-phosphate
  modified_base 19: mod_base = OTHER; note = 2'-O-methylguanosine-3'-phosphate
  modified_base 20: mod_base = OTHER; note = 2'-O-methylcytidine-3'-phosphate
  modified_base 21: mod_base = OTHER; note = 2'-O-methyladenosine-3'-phosphorothioate
  modified_base 22: mod_base = OTHER; note = 2'-O-methyladenosine-3'-phosphorothioate
  modified_base 23: mod_base = OTHER; note = 2'-O-methyladenosine
actgctcagggaatctatgcaaa

SEQ ID NO: 1407 - RNA, 23 nt, synthetic construct
  source 1..23: mol_type = other RNA
  modified_base 1: mod_base = OTHER; note = 2'-O-methyladenosine-3'-phosphorothioate
  modified_base 2: mod_base = OTHER; note = 2'-deoxy-2'-fluorouridine-3'-phosphorothioate
  modified_base 3: mod_base = OTHER; note = 2'-O-methyladenosine-3'-phosphate
  modified_base 4: mod_base = OTHER; note = 2'-O-methyladenosine-3'-phosphate
  modified_base 5: mod_base = OTHER; note = 2'-O-methyladenosine-3'-phosphate
  modified_base 6: mod_base = OTHER; note = 2'-deoxy-2'-fluoroadenosine-3'-phosphate
  modified_base 7: mod_base = OTHER; note = 2'-O-methyluridine-3'-phosphate
  modified_base 8: mod_base = OTHER; note = 2'-deoxy-2'-fluorocytidine-3'-phosphate
  modified_base 9: mod_base = OTHER; note = 2'-deoxy-2'-fluorocytidine-3'-phosphate
  modified_base 10: mod_base = OTHER; note = 2'-O-methyluridine-3'-phosphate
  modified_base 11: mod_base = OTHER; note = 2'-O-methylguanosine-3'-phosphate
  modified_base 12: mod_base = OTHER; note = 2'-O-methylcytidine-3'-phosphate
  modified_base 13: mod_base = OTHER; note = 2'-O-methyluridine-3'-phosphate
  modified_base 14: mod_base = OTHER; note = 2'-deoxy-2'-fluorocytidine-3'-phosphate
  modified_base 15: mod_base = OTHER; note = 2'-O-methyladenosine-3'-phosphate
  modified_base 16: mod_base = OTHER; note = 2'-deoxy-2'-fluoroguanosine-3'-phosphate
  modified_base 17: mod_base = OTHER; note = 2'-O-methylguanosine-3'-phosphate
  modified_base 18: mod_base = OTHER; note = 2'-O-methylguanosine-3'-phosphate
  modified_base 19: mod_base = OTHER; note = 2'-O-methyladenosine-3'-phosphate
  modified_base 20: mod_base = OTHER; note = 2'-O-methyladenosine-3'-phosphate
  modified_base 21: mod_base = OTHER; note = 2'-O-methyluridine-3'-phosphorothioate
  modified_base 22: mod_base = OTHER; note = 2'-O-methylcytidine-3'-phosphorothioate
  modified_base 23: mod_base = OTHER; note = 2'-O-methyluridine
ataaaatcctgctcagggaatct

SEQ ID NO: 1408 - RNA, 23 nt, synthetic construct
  source 1..23: mol_type = other RNA
  modified_base 1: mod_base = OTHER; note = 2'-O-methyladenosine-3'-phosphorothioate
  modified_base 2: mod_base = OTHER; note = 2'-deoxy-2'-fluoroadenosine-3'-phosphorothioate
  modified_base 3: mod_base = OTHER; note = 2'-O-methyladenosine-3'-phosphate
  modified_base 4: mod_base = OTHER; note = 2'-O-methyladenosine-3'-phosphate
  modified_base 5: mod_base = OTHER; note = 2'-O-methylguanosine-3'-phosphate
  modified_base 6: mod_base = OTHER; note = 2'-deoxy-2'-fluoroadenosine-3'-phosphate
  modified_base 7: mod_base = OTHER; note = 2'-O-methyluridine-3'-phosphate
  modified_base 8: mod_base = OTHER; note = 2'-deoxy-2'-fluorouridine-3'-phosphate
  modified_base 9: mod_base = OTHER; note = 2'-deoxy-2'-fluoroadenosine-3'-phosphate
  modified_base 10: mod_base = OTHER; note = 2'-O-methyladenosine-3'-phosphate
  modified_base 11: mod_base = OTHER; note = 2'-O-methyladenosine-3'-phosphate
  modified_base 12: mod_base = OTHER; note = 2'-O-methyladenosine-3'-phosphate
  modified_base 13: mod_base = OTHER; note = 2'-O-methyluridine-3'-phosphate
  modified_base 14: mod_base = OTHER; note = 2'-deoxy-2'-fluorocytidine-3'-phosphate
  modified_base 15: mod_base = OTHER; note = 2'-O-methylcytidine-3'-phosphate
  modified_base 16: mod_base = OTHER; note = 2'-deoxy-2'-fluorouridine-3'-phosphate
  modified_base 17: mod_base = OTHER; note = 2'-O-methylguanosine-3'-phosphate
  modified_base 18: mod_base = OTHER; note = 2'-O-methylcytidine-3'-phosphate
  modified_base 19: mod_base = OTHER; note = 2'-O-methyluridine-3'-phosphate
  modified_base 20: mod_base = OTHER; note = 2'-O-methylcytidine-3'-phosphate
  modified_base 21: mod_base = OTHER; note = 2'-O-methyladenosine-3'-phosphorothioate
  modified_base 22: mod_base = OTHER; note = 2'-O-methylguanosine-3'-phosphorothioate
  modified_base 23: mod_base = OTHER; note = 2'-O-methylguanosine
aaaagattaaaatcctgctcagg

SEQ ID NO: 1409 - RNA, 23 nt, synthetic construct
  source 1..23: mol_type = other RNA
  modified_base 1: mod_base = OTHER; note = 2'-O-methyladenosine-3'-phosphorothioate
  modified_base 2: mod_base = OTHER; note = 2'-deoxy-2'-fluoroguanosine-3'-phosphorothioate
  modified_base 3: mod_base = OTHER; note = 2'-O-methyluridine-3'-phosphate
  modified_base 4: mod_base = OTHER; note = 2'-O-methylcytidine-3'-phosphate
  modified_base 5: mod_base = OTHER; note = 2'-O-methylcytidine-3'-phosphate
  modified_base 6: mod_base = OTHER; note = 2'-deoxy-2'-fluoroadenosine-3'-phosphate
  modified_base 7: mod_base = OTHER; note = 2'-O-methylguanosine-3'-phosphate
  modified_base 8: mod_base = OTHER; note = 2'-deoxy-2'-fluorouridine-3'-phosphate
  modified_base 9: mod_base = OTHER; note = 2'-deoxy-2'-fluorouridine-3'-phosphate
  modified_base 10: mod_base = OTHER; note = 2'-O-methyladenosine-3'-phosphate
  modified_base 11: mod_base = OTHER; note = 2'-O-methylguanosine-3'-phosphate
  modified_base 12: mod_base = OTHER; note = 2'-O-methyladenosine-3'-phosphate
  modified_base 13: mod_base = OTHER; note = 2'-O-methyladenosine-3'-phosphate
  modified_base 14: mod_base = OTHER; note = 2'-deoxy-2'-fluoroadenosine-3'-phosphate
  modified_base 15: mod_base = OTHER; note = 2'-O-methyladenosine-3'-phosphate
  modified_base 16: mod_base = OTHER; note = 2'-deoxy-2'-fluoroadenosine-3'-phosphate
  modified_base 17: mod_base = OTHER; note = 2'-O-methylguanosine-3'-phosphate
  modified_base 18: mod_base = OTHER; note = 2'-O-methyladenosine-3'-phosphate
  modified_base 19: mod_base = OTHER; note = 2'-O-methyluridine-3'-phosphate
  modified_base 20: mod_base = OTHER; note = 2'-O-methyluridine-3'-phosphate
  modified_base 21: mod_base = OTHER; note = 2'-O-methyladenosine-3'-phosphorothioate
  modified_base 22: mod_base = OTHER; note = 2'-O-methyladenosine-3'-phosphorothioate
  modified_base 23: mod_base = OTHER; note = 2'-O-methyladenosine
agtccagttagaaaaagattaaa

SEQ ID NO: 1410 - RNA, 23 nt, synthetic construct
  source 1..23: mol_type = other RNA
  modified_base 1: mod_base = OTHER; note = 2'-O-methyladenosine-3'-phosphorothioate
  modified_base 2: mod_base = OTHER; note = 2'-deoxy-2'-fluorouridine-3'-phosphorothioate
  modified_base 3: mod_base = OTHER; note = 2'-O-methyluridine-3'-phosphate
  modified_base 4: mod_base = OTHER; note = 2'-O-methyluridine-3'-phosphate
  modified_base 5: mod_base = OTHER; note = 2'-O-methylguanosine-3'-phosphate
  modified_base 6: mod_base = OTHER; note = 2'-deoxy-2'-fluoroadenosine-3'-phosphate
  modified_base 7: mod_base = OTHER; note = 2'-O-methyladenosine-3'-phosphate
  modified_base 8: mod_base = OTHER; note = 2'-deoxy-2'-fluorocytidine-3'-phosphate
  modified_base 9: mod_base = OTHER; note = 2'-deoxy-2'-fluorocytidine-3'-phosphate
  modified_base 10: mod_base = OTHER; note = 2'-O-methyladenosine-3'-phosphate
  modified_base 11: mod_base = OTHER; note = 2'-O-methylguanosine-3'-phosphate
  modified_base 12: mod_base = OTHER; note = 2'-O-methyluridine-3'-phosphate
  modified_base 13: mod_base = OTHER; note = 2'-O-methylcytidine-3'-phosphate
  modified_base 14: mod_base = OTHER; note = 2'-deoxy-2'-fluorocytidine-3'-phosphate
  modified_base 15: mod_base = OTHER; note = 2'-O-methyladenosine-3'-phosphate
  modified_base 16: mod_base = OTHER; note = 2'-deoxy-2'-fluoroguanosine-3'-phosphate
  modified_base 17: mod_base = OTHER; note = 2'-O-methyluridine-3'-phosphate
  modified_base 18: mod_base = OTHER; note = 2'-O-methyluridine-3'-phosphate
  modified_base 19: mod_base = OTHER; note = 2'-O-methyladenosine-3'-phosphate
  modified_base 20: mod_base = OTHER; note = 2'-O-methylguanosine-3'-phosphate
  modified_base 21: mod_base = OTHER; note = 2'-O-methyladenosine-3'-phosphorothioate
  modified_base 22: mod_base = OTHER; note = 2'-O-methyladenosine-3'-phosphorothioate
  modified_base 23: mod_base = OTHER; note = 2'-O-methyladenosine
atttgaaccagtccagttagaaa

SEQ ID NO: 1411 - RNA, 23 nt, synthetic construct
  source 1..23: mol_type = other RNA
  modified_base 1: mod_base = OTHER; note = 2'-O-methyladenosine-3'-phosphorothioate
  modified_base 2: mod_base = OTHER; note = 2'-deoxy-2'-fluoroadenosine-3'-phosphorothioate
  modified_base 3: mod_base = OTHER; note = 2'-O-methyladenosine-3'-phosphate
  modified_base 4: mod_base = OTHER; note = 2'-O-methylcytidine-3'-phosphate
  modified_base 5: mod_base = OTHER; note = 2'-O-methyladenosine-3'-phosphate
  modified_base 6: mod_base = OTHER; note = 2'-deoxy-2'-fluoroadenosine-3'-phosphate
  modified_base 7: mod_base = OTHER; note = 2'-O-methylcytidine-3'-phosphate
  modified_base 8: mod_base = OTHER; note = 2'-deoxy-2'-fluoroadenosine-3'-phosphate
  modified_base 9: mod_base = OTHER; note = 2'-deoxy-2'-fluorouridine-3'-phosphate
  modified_base 10: mod_base = OTHER; note = 2'-O-methyluridine-3'-phosphate
  modified_base 11: mod_base = OTHER; note = 2'-O-methyluridine-3'-phosphate
  modified_base 12: mod_base = OTHER; note = 2'-O-methylguanosine-3'-phosphate
  modified_base 13: mod_base = OTHER; note = 2'-O-methyladenosine-3'-phosphate
  modified_base 14: mod_base = OTHER; note = 2'-deoxy-2'-fluoroadenosine-3'-phosphate
  modified_base 15: mod_base = OTHER; note = 2'-O-methylcytidine-3'-phosphate
  modified_base 16: mod_base = OTHER; note = 2'-deoxy-2'-fluorocytidine-3'-phosphate
  modified_base 17: mod_base = OTHER; note = 2'-O-methyladenosine-3'-phosphate
  modified_base 18: mod_base = OTHER; note = 2'-O-methylguanosine-3'-phosphate
  modified_base 19: mod_base = OTHER; note = 2'-O-methyluridine-3'-phosphate
  modified_base 20: mod_base = OTHER; note = 2'-O-methylcytidine-3'-phosphate
  modified_base 21: mod_base = OTHER; note = 2'-O-methylcytidine-3'-phosphorothioate
  modified_base 22: mod_base = OTHER; note = 2'-O-methyladenosine-3'-phosphorothioate
  modified_base 23: mod_base = OTHER; note = 2'-O-methylguanosine
aaacaacatttgaaccagtccag

SEQ ID NO: 1412 - RNA, 23 nt, synthetic construct
  source 1..23: mol_type = other RNA
  modified_base 1: mod_base = OTHER; note = 2'-O-methyladenosine-3'-phosphorothioate
  modified_base 2: mod_base = OTHER; note = 2'-deoxy-2'-fluorouridine-3'-phosphorothioate
  modified_base 3: mod_base = OTHER; note = 2'-O-methyladenosine-3'-phosphate
  modified_base 4: mod_base = OTHER; note = 2'-O-methyladenosine-3'-phosphate
  modified_base 5: mod_base = OTHER; note = 2'-O-methyladenosine-3'-phosphate
  modified_base 6: mod_base = OTHER; note = 2'-deoxy-2'-fluoroguanosine-3'-phosphate
  modified_base 7: mod_base = OTHER; note = 2'-O-methyladenosine-3'-phosphate
  modified_base 8: mod_base = OTHER; note = 2'-deoxy-2'-fluoroadenosine-3'-phosphate
  modified_base 9: mod_base = OTHER; note = 2'-deoxy-2'-fluoroguanosine-3'-phosphate
  modified_base 10: mod_base = OTHER; note = 2'-O-methyladenosine-3'-phosphate
  modified_base 11: mod_base = OTHER; note = 2'-O-methylguanosine-3'-phosphate
  modified_base 12: mod_base = OTHER; note = 2'-O-methyladenosine-3'-phosphate
  modified_base 13: mod_base = OTHER; note = 2'-O-methyladenosine-3'-phosphate
  modified_base 14: mod_base = OTHER; note = 2'-deoxy-2'-fluorocytidine-3'-phosphate
  modified_base 15: mod_base = OTHER; note = 2'-O-methyladenosine-3'-phosphate
  modified_base 16: mod_base = OTHER; note = 2'-deoxy-2'-fluoroadenosine-3'-phosphate
  modified_base 17: mod_base = OTHER; note = 2'-O-methylcytidine-3'-phosphate
  modified_base 18: mod_base = OTHER; note = 2'-O-methyladenosine-3'-phosphate
  modified_base 19: mod_base = OTHER; note = 2'-O-methyluridine-3'-phosphate
  modified_base 20: mod_base = OTHER; note = 2'-O-methyluridine-3'-phosphate
  modified_base 21: mod_base = OTHER; note = 2'-O-methyluridine-3'-phosphorothioate
  modified_base 22: mod_base = OTHER; note = 2'-O-methylguanosine-3'-phosphorothioate
  modified_base 23: mod_base = OTHER; note = 2'-O-methyladenosine
ataaagaagagaacaacatttga

SEQ ID NO: 1413 - RNA, 23 nt, synthetic construct
  source 1..23: mol_type = other RNA
  modified_base 1: mod_base = OTHER; note = 2'-O-methyladenosine-3'-phosphorothioate
  modified_base 2: mod_base = OTHER; note = 2'-deoxy-2'-fluorocytidine-3'-phosphorothioate
  modified_base 3: mod_base = OTHER; note = 2'-O-methyladenosine-3'-phosphate
  modified_base 4: mod_base = OTHER; note = 2'-O-methyluridine-3'-phosphate
  modified_base 5: mod_base = OTHER; note = 2'-O-methylcytidine-3'-phosphate
  modified_base 6: mod_base = OTHER; note = 2'-deoxy-2'-fluorocytidine-3'-phosphate
  modified_base 7: mod_base = OTHER; note = 2'-O-methylcytidine-3'-phosphate
  modified_base 8: mod_base = OTHER; note = 2'-deoxy-2'-fluorouridine-3'-phosphate
  modified_base 9: mod_base = OTHER; note = 2'-deoxy-2'-fluorouridine-3'-phosphate
  modified_base 10: mod_base = OTHER; note = 2'-O-methyluridine-3'-phosphate
  modified_base 11: mod_base = OTHER; note = 2'-O-methyladenosine-3'-phosphate
  modified_base 12: mod_base = OTHER; note = 2'-O-methyladenosine-3'-phosphate
  modified_base 13: mod_base = OTHER; note = 2'-O-methyladenosine-3'-phosphate
  modified_base 14: mod_base = OTHER; note = 2'-deoxy-2'-fluoroguanosine-3'-phosphate
  modified_base 15: mod_base = OTHER; note = 2'-O-methyladenosine-3'-phosphate
  modified_base 16: mod_base = OTHER; note = 2'-deoxy-2'-fluoroadenosine-3'-phosphate
  modified_base 17: mod_base = OTHER; note = 2'-O-methylguanosine-3'-phosphate
  modified_base 18: mod_base = OTHER; note = 2'-O-methyladenosine-3'-phosphate
  modified_base 19: mod_base = OTHER; note = 2'-O-methylguanosine-3'-phosphate
  modified_base 20: mod_base = OTHER; note = 2'-O-methyladenosine-3'-phosphate
  modified_base 21: mod_base = OTHER; note = 2'-O-methyladenosine-3'-phosphorothioate
  modified_base 22: mod_base = OTHER; note = 2'-O-methylcytidine-3'-phosphorothioate
  modified_base 23: mod_base = OTHER; note = 2'-O-methyladenosine
acatccctttaaagaagagaaca

SEQ ID NO: 1414 - RNA, 23 nt, synthetic construct
  source 1..23: mol_type = other RNA
  modified_base 1: mod_base = OTHER; note = 2'-O-methyladenosine-3'-phosphorothioate
  modified_base 2: mod_base = OTHER; note = 2'-deoxy-2'-fluoroadenosine-3'-phosphorothioate
  modified_base 3: mod_base = OTHER; note = 2'-O-methyluridine-3'-phosphate
  modified_base 4: mod_base = OTHER; note = 2'-O-methylcytidine-3'-phosphate
  modified_base 5: mod_base = OTHER; note = 2'-O-methyluridine-3'-phosphate
  modified_base 6: mod_base = OTHER; note = 2'-deoxy-2'-fluorouridine-3'-phosphate
  modified_base 7: mod_base = OTHER; note = 2'-O-methylguanosine-3'-phosphate
  modified_base 8: mod_base = OTHER; note = 2'-deoxy-2'-fluorocytidine-3'-phosphate
  modified_base 9: mod_base = OTHER; note = 2'-deoxy-2'-fluorocytidine-3'-phosphate
  modified_base 10: mod_base = OTHER; note = 2'-O-methyladenosine-3'-phosphate
  modified_base 11: mod_base = OTHER; note = 2'-O-methyluridine-3'-phosphate
  modified_base 12: mod_base = OTHER; note = 2'-O-methylcytidine-3'-phosphate
  modified_base 13: mod_base = OTHER; note = 2'-O-methylcytidine-3'-phosphate
  modified_base 14: mod_base = OTHER; note = 2'-deoxy-2'-fluorocytidine-3'-phosphate
  modified_base 15: mod_base = OTHER; note = 2'-O-methyluridine-3'-phosphate
  modified_base 16: mod_base = OTHER; note = 2'-deoxy-2'-fluorouridine-3'-phosphate
  modified_base 17: mod_base = OTHER; note = 2'-O-methyluridine-3'-phosphate
  modified_base 18: mod_base = OTHER; note = 2'-O-methyladenosine-3'-phosphate
  modified_base 19: mod_base = OTHER; note = 2'-O-methyladenosine-3'-phosphate
  modified_base 20: mod_base = OTHER; note = 2'-O-methyladenosine-3'-phosphate
  modified_base 21: mod_base = OTHER; note = 2'-O-methylguanosine-3'-phosphorothioate
  modified_base 22: mod_base = OTHER; note = 2'-O-methyladenosine-3'-phosphorothioate
  modified_base 23: mod_base = OTHER; note = 2'-O-methyladenosine
aatcttgccatccctttaaagaa

SEQ ID NO: 1415 - RNA, 23 nt, synthetic construct
  source 1..23: mol_type = other RNA
  modified_base 1: mod_base = OTHER; note = 2'-O-methyladenosine-3'-phosphorothioate
  modified_base 2: mod_base = OTHER; note = 2'-deoxy-2'-fluoroadenosine-3'-phosphorothioate
  modified_base 3: mod_base = OTHER; note = 2'-O-methyluridine-3'-phosphate
  modified_base 4: mod_base = OTHER; note = 2'-O-methylcytidine-3'-phosphate
  modified_base 5: mod_base = OTHER; note = 2'-O-methyladenosine-3'-phosphate
  modified_base 6: mod_base = OTHER; note = 2'-deoxy-2'-fluorocytidine-3'-phosphate
  modified_base 7: mod_base = OTHER; note = 2'-O-methyluridine-3'-phosphate
  modified_base 8: mod_base = OTHER; note = 2'-deoxy-2'-fluoroguanosine-3'-phosphate
  modified_base 9: mod_base = OTHER; note = 2'-deoxy-2'-fluorocytidine-3'-phosphate
  modified_base 10: mod_base = OTHER; note = 2'-O-methylcytidine-3'-phosphate
  modified_base 11: mod_base = OTHER; note = 2'-O-methylcytidine-3'-phosphate
  modified_base 12: mod_base = OTHER; note = 2'-O-methyladenosine-3'-phosphate
  modified_base 13: mod_base = OTHER; note = 2'-O-methylcytidine-3'-phosphate
  modified_base 14: mod_base = OTHER; note = 2'-deoxy-2'-fluoroadenosine-3'-phosphate
  modified_base 15: mod_base = OTHER; note = 2'-O-methyluridine-3'-phosphate
  modified_base 16: mod_base = OTHER; note = 2'-deoxy-2'-fluorocytidine-3'-phosphate
  modified_base 17: mod_base = OTHER; note = 2'-O-methyluridine-3'-phosphate
  modified_base 18: mod_base = OTHER; note = 2'-O-methyluridine-3'-phosphate
  modified_base 19: mod_base = OTHER; note = 2'-O-methylguanosine-3'-phosphate
  modified_base 20: mod_base = OTHER; note = 2'-O-methylcytidine-3'-phosphate
  modified_base 21: mod_base = OTHER; note = 2'-O-methylcytidine-3'-phosphorothioate
  modified_base 22: mod_base = OTHER; note = 2'-O-methyladenosine-3'-phosphorothioate
  modified_base 23: mod_base = OTHER; note = 2'-O-methyluridine
aatcactgcccacatcttgccat

SEQ ID NO: 1416 - RNA, 23 nt, synthetic construct
  source 1..23: mol_type = other RNA
  modified_base 1: mod_base = OTHER; note = 2'-O-methyladenosine-3'-phosphorothioate
  modified_base 2: mod_base = OTHER; note = 2'-deoxy-2'-fluorocytidine-3'-phosphorothioate
  modified_base 3: mod_base = OTHER; note = 2'-O-methylcytidine-3'-phosphate
  modified_base 4: mod_base = OTHER; note = 2'-O-methyluridine-3'-phosphate
  modified_base 5: mod_base = OTHER; note = 2'-O-methyladenosine-3'-phosphate
  modified_base 6: mod_base = OTHER; note = 2'-deoxy-2'-fluoroguanosine-3'-phosphate
  modified_base 7: mod_base = OTHER; note = 2'-O-methyluridine-3'-phosphate
  modified_base 8: mod_base = OTHER; note = 2'-deoxy-2'-fluoroguanosine-3'-phosphate
  modified_base 9: mod_base = OTHER; note = 2'-deoxy-2'-fluoroadenosine-3'-phosphate
  modified_base 10: mod_base = OTHER; note = 2'-O-methylcytidine-3'-phosphate
  modified_base 11: mod_base = OTHER; note = 2'-O-methyladenosine-3'-phosphate
  modified_base 12: mod_base = OTHER; note = 2'-O-methyluridine-3'-phosphate
  modified_base 13: mod_base = OTHER; note = 2'-O-methylcytidine-3'-phosphate
  modified_base 14: mod_base = OTHER; note = 2'-deoxy-2'-fluoroadenosine-3'-phosphate
  modified_base 15: mod_base = OTHER; note = 2'-O-methylcytidine-3'-phosphate
  modified_base 16: mod_base = OTHER; note = 2'-deoxy-2'-fluorouridine-3'-phosphate
  modified_base 17: mod_base = OTHER; note = 2'-O-methylguanosine-3'-phosphate
  modified_base 18: mod_base = OTHER; note = 2'-O-methylcytidine-3'-phosphate
  modified_base 19: mod_base = OTHER; note = 2'-O-methylcytidine-3'-phosphate
  modified_base 20: mod_base = OTHER; note = 2'-O-methylcytidine-3'-phosphate
  modified_base 21: mod_base = OTHER; note = 2'-O-methyladenosine-3'-phosphorothioate
  modified_base 22: mod_base = OTHER; note = 2'-O-methylcytidine-3'-phosphorothioate
  modified_base 23: mod_base = OTHER; note = 2'-O-methyladenosine
acctagtgacatcactgcccaca

SEQ ID NO: 1417 - RNA, 23 nt, synthetic construct
  source 1..23: mol_type = other RNA
  modified_base 1: mod_base = OTHER; note = 2'-O-methyladenosine-3'-phosphorothioate
  modified_base 2: mod_base = OTHER; note = 2'-deoxy-2'-fluoroadenosine-3'-phosphorothioate
  modified_base 3: mod_base = OTHER; note = 2'-O-methyladenosine-3'-phosphate
  modified_base 4: mod_base = OTHER; note = 2'-O-methyluridine-3'-phosphate
  modified_base 5: mod_base = OTHER; note = 2'-O-methylcytidine-3'-phosphate
  modified_base 6: mod_base = OTHER; note = 2'-deoxy-2'-fluorocytidine-3'-phosphate
  modified_base 7: mod_base = OTHER; note = 2'-O-methylcytidine-3'-phosphate
  modified_base 8: mod_base = OTHER; note = 2'-deoxy-2'-fluorouridine-3'-phosphate
  modified_base 9: mod_base = OTHER; note = 2'-deoxy-2'-fluorocytidine-3'-phosphate
  modified_base 10: mod_base = OTHER; note = 2'-O-methyluridine-3'-phosphate
  modified_base 11: mod_base = OTHER; note = 2'-O-methyluridine-3'-phosphate
  modified_base 12: mod_base = OTHER; note = 2'-O-methyladenosine-3'-phosphate
  modified_base 13: mod_base = OTHER; note = 2'-O-methyluridine-3'-phosphate
  modified_base 14: mod_base = OTHER; note = 2'-deoxy-2'-fluorocytidine-3'-phosphate
  modified_base 15: mod_base = OTHER; note = 2'-O-methylcytidine-3'-phosphate
  modified_base 16: mod_base = OTHER; note = 2'-deoxy-2'-fluorouridine-3'-phosphate
  modified_base 17: mod_base = OTHER; note = 2'-O-methylguanosine-3'-phosphate
  modified_base 18: mod_base = OTHER; note = 2'-O-methyluridine-3'-phosphate
  modified_base 19: mod_base = OTHER; note = 2'-O-methylcytidine-3'-phosphate
  modified_base 20: mod_base = OTHER; note = 2'-O-methylcytidine-3'-phosphate
  modified_base 21: mod_base = OTHER; note = 2'-O-methylcytidine-3'-phosphorothioate
  modified_base 22: mod_base = OTHER; note = 2'-O-methyluridine-3'-phosphorothioate
  modified_base 23: mod_base = OTHER; note = 2'-O-methylguanosine
aaatccctcttatcctgtccctg

SEQ ID NO: 1418 - RNA, 23 nt, synthetic construct
  source 1..23: mol_type = other RNA
  modified_base 1: mod_base = OTHER; note = 2'-O-methyladenosine-3'-phosphorothioate
  modified_base 2: mod_base = OTHER; note = 2'-deoxy-2'-fluorocytidine-3'-phosphorothioate
  modified_base 3: mod_base = OTHER; note = 2'-O-methyluridine-3'-phosphate
  modified_base 4: mod_base = OTHER; note = 2'-O-methylcytidine-3'-phosphate
  modified_base 5: mod_base = OTHER; note = 2'-O-methylcytidine-3'-phosphate
  modified_base 6: mod_base = OTHER; note = 2'-deoxy-2'-fluorocytidine-3'-phosphate
  modified_base 7: mod_base = OTHER; note = 2'-O-methyluridine-3'-phosphate
  modified_base 8: mod_base = OTHER; note = 2'-deoxy-2'-fluoroadenosine-3'-phosphate
  modified_base 9: mod_base = OTHER; note = 2'-deoxy-2'-fluoroadenosine-3'-phosphate
  modified_base 10: mod_base = OTHER; note = 2'-O-methyluridine-3'-phosphate
  modified_base 11: mod_base = OTHER; note = 2'-O-methylcytidine-3'-phosphate
  modified_base 12: mod_base = OTHER; note = 2'-O-methylcytidine-3'-phosphate
  modified_base 13: mod_base = OTHER; note = 2'-O-methylcytidine-3'-phosphate
  modified_base 14: mod_base = OTHER; note = 2'-deoxy-2'-fluorouridine-3'-phosphate
  modified_base 15: mod_base = OTHER; note = 2'-O-methylcytidine-3'-phosphate
  modified_base 16: mod_base = OTHER; note = 2'-deoxy-2'-fluorouridine-3'-phosphate
  modified_base 17: mod_base = OTHER; note = 2'-O-methyluridine-3'-phosphate
  modified_base 18: mod_base = OTHER; note = 2'-O-methyladenosine-3'-phosphate
  modified_base 19: mod_base = OTHER; note = 2'-O-methyluridine-3'-phosphate
  modified_base 20: mod_base = OTHER; note = 2'-O-methylcytidine-3'-phosphate
  modified_base 21: mod_base = OTHER; note = 2'-O-methylcytidine-3'-phosphorothioate
  modified_base 22: mod_base = OTHER; note = 2'-O-methyluridine-3'-phosphorothioate
  modified_base 23: mod_base = OTHER; note = 2'-O-methylguanosine
actccctaatccctcttatcctg

SEQ ID NO: 1419 - RNA, 23 nt, synthetic construct
  source 1..23: mol_type = other RNA
  modified_base 1: mod_base = OTHER; note = 2'-O-methyladenosine-3'-phosphorothioate
  modified_base 2: mod_base = OTHER; note = 2'-deoxy-2'-fluoroadenosine-3'-phosphorothioate
  modified_base 3: mod_base = OTHER; note = 2'-O-methyluridine-3'-phosphate
  modified_base 4: mod_base = OTHER; note = 2'-O-methylcytidine-3'-phosphate
  modified_base 5: mod_base = OTHER; note = 2'-O-methyluridine-3'-phosphate
  modified_base 6: mod_base = OTHER; note = 2'-deoxy-2'-fluorouridine-3'-phosphate
  modified_base 7: mod_base = OTHER; note = 2'-O-methylcytidine-3'-phosphate
  modified_base 8: mod_base = OTHER; note = 2'-deoxy-2'-fluorouridine-3'-phosphate
  modified_base 9: mod_base = OTHER; note = 2'-deoxy-2'-fluorocytidine-3'-phosphate
  modified_base 10: mod_base = OTHER; note = 2'-O-methyluridine-3'-phosphate
  modified_base 11: mod_base = OTHER; note = 2'-O-methylcytidine-3'-phosphate
  modified_base 12: mod_base = OTHER; note = 2'-O-methylcytidine-3'-phosphate
  modified_base 13: mod_base = OTHER; note = 2'-O-methylcytidine-3'-phosphate
  modified_base 14: mod_base = OTHER; note = 2'-deoxy-2'-fluorouridine-3'-phosphate
  modified_base 15: mod_base = OTHER; note = 2'-O-methyladenosine-3'-phosphate
  modified_base 16: mod_base = OTHER; note = 2'-deoxy-2'-fluoroadenosine-3'-phosphate
  modified_base 17: mod_base = OTHER; note = 2'-O-methyluridine-3'-phosphate
  modified_base 18: mod_base = OTHER; note = 2'-O-methylcytidine-3'-phosphate
  modified_base 19: mod_base = OTHER; note = 2'-O-methylcytidine-3'-phosphate
  modified_base 20: mod_base = OTHER; note = 2'-O-methylcytidine-3'-phosphate
  modified_base 21: mod_base = OTHER; note = 2'-O-methyluridine-3'-phosphorothioate
  modified_base 22: mod_base = OTHER; note = 2'-O-methylcytidine-3'-phosphorothioate
  modified_base 23: mod_base = OTHER; note = 2'-O-methyluridine
aatcttctctccctaatccctct

SEQ ID NO: 1420 - RNA, 23 nt, synthetic construct
  source 1..23: mol_type = other RNA
  modified_base 1: mod_base = OTHER; note = 2'-O-methyladenosine-3'-phosphorothioate
  modified_base 2: mod_base = OTHER; note = 2'-deoxy-2'-fluorocytidine-3'-phosphorothioate
  modified_base 3: mod_base = OTHER; note = 2'-O-methylcytidine-3'-phosphate
  modified_base 4: mod_base = OTHER; note = 2'-O-methyluridine-3'-phosphate
  modified_base 5: mod_base = OTHER; note = 2'-O-methylguanosine-3'-phosphate
  modified_base 6: mod_base = OTHER; note = 2'-deoxy-2'-fluorocytidine-3'-phosphate
  modified_base 7: mod_base = OTHER; note = 2'-O-methyluridine-3'-phosphate
  modified_base 8: mod_base = OTHER; note = 2'-deoxy-2'-fluoroadenosine-3'-phosphate
  modified_base 9: mod_base = OTHER; note = 2'-deoxy-2'-fluorouridine-3'-phosphate
  modified_base 10: mod_base = OTHER; note = 2'-O-methylcytidine-3'-phosphate
  modified_base 11: mod_base = OTHER; note = 2'-O-methyluridine-3'-phosphate
  modified_base 12: mod_base = OTHER; note = 2'-O-methyluridine-3'-phosphate
  modified_base 13: mod_base = OTHER; note = 2'-O-methylcytidine-3'-phosphate
  modified_base 14: mod_base = OTHER; note = 2'-deoxy-2'-fluorouridine-3'-phosphate
  modified_base 15: mod_base = OTHER; note = 2'-O-methylcytidine-3'-phosphate
  modified_base 16: mod_base = OTHER; note = 2'-deoxy-2'-fluorouridine-3'-phosphate
  modified_base 17: mod_base = OTHER; note = 2'-O-methylcytidine-3'-phosphate
  modified_base 18: mod_base = OTHER; note = 2'-O-methylcytidine-3'-phosphate
  modified_base 19: mod_base = OTHER; note = 2'-O-methylcytidine-3'-phosphate
  modified_base 20: mod_base = OTHER; note = 2'-O-methyluridine-3'-phosphate
  modified_base 21: mod_base = OTHER; note = 2'-O-methyladenosine-3'-phosphorothioate
  modified_base 22: mod_base = OTHER; note = 2'-O-methyladenosine-3'-phosphorothioate
  modified_base 23: mod_base = OTHER; note = 2'-O-methyluridine
acctgctatcttctctccctaat

SEQ ID NO: 1421 - RNA, 23 nt, synthetic construct
  source 1..23: mol_type = other RNA
  modified_base 1: mod_base = OTHER; note = 2'-O-methyladenosine-3'-phosphorothioate
  modified_base 2: mod_base = OTHER; note = 2'-deoxy-2'-fluoroguanosine-3'-phosphorothioate
  modified_base 3: mod_base = OTHER; note = 2'-O-methylcytidine-3'-phosphate
  modified_base 4: mod_base = OTHER; note = 2'-O-methyluridine-3'-phosphate
  modified_base 5: mod_base = OTHER; note = 2'-O-methyluridine-3'-phosphate
  modified_base 6: mod_base = OTHER; note = 2'-deoxy-2'-fluoroguanosine-3'-phosphate
  modified_base 7: mod_base = OTHER; note = 2'-O-methylguanosine-3'-phosphate
  modified_base 8: mod_base = OTHER; note = 2'-deoxy-2'-fluoroadenosine-3'-phosphate
  modified_base 9: mod_base = OTHER; note = 2'-deoxy-2'-fluorocytidine-3'-phosphate
  modified_base 10: mod_base = OTHER; note = 2'-O-methyluridine-3'-phosphate
  modified_base 11: mod_base = OTHER; note = 2'-O-methyluridine-3'-phosphate
  modified_base 12: mod_base = OTHER; note = 2'-O-methylguanosine-3'-phosphate
  modified_base 13: mod_base = OTHER; note = 2'-O-methylguanosine-3'-phosphate
  modified_base 14: mod_base = OTHER; note = 2'-deoxy-2'-fluoroguanosine-3'-phosphate
  modified_base 15: mod_base = OTHER; note = 2'-O-methyluridine-3'-phosphate
  modified_base 16: mod_base = OTHER; note = 2'-deoxy-2'-fluorouridine-3'-phosphate
  modified_base 17: mod_base = OTHER; note = 2'-O-methylcytidine-3'-phosphate
  modified_base 18: mod_base = OTHER; note = 2'-O-methylcytidine-3'-phosphate
  modified_base 19: mod_base = OTHER; note = 2'-O-methylcytidine-3'-phosphate
  modified_base 20: mod_base = OTHER; note = 2'-O-methyladenosine-3'-phosphate
  modified_base 21: mod_base = OTHER; note = 2'-O-methylguanosine-3'-phosphorothioate
  modified_base 22: mod_base = OTHER; note = 2'-O-methylcytidine-3'-phosphorothioate
  modified_base 23: mod_base = OTHER; note = 2'-O-methylcytidine
agcttggacttgggttcccagcc

SEQ ID NO: 1422 - RNA, 23 nt, synthetic construct
  source 1..23: mol_type = other RNA
  modified_base 1: mod_base = OTHER; note = 2'-O-methyladenosine-3'-phosphorothioate
  modified_base 2: mod_base = OTHER; note = 2'-deoxy-2'-fluorouridine-3'-phosphorothioate
  modified_base 3: mod_base = OTHER; note = 2'-O-methylguanosine-3'-phosphate
  modified_base 4: mod_base = OTHER; note = 2'-O-methylguanosine-3'-phosphate
  modified_base 5: mod_base = OTHER; note = 2'-O-methyluridine-3'-phosphate
  modified_base 6: mod_base = OTHER; note = 2'-deoxy-2'-fluoroadenosine-3'-phosphate
  modified_base 7: mod_base = OTHER; note = 2'-O-methyluridine-3'-phosphate
  modified_base 8: mod_base = OTHER; note = 2'-deoxy-2'-fluoroguanosine-3'-phosphate
  modified_base 9: mod_base = OTHER; note = 2'-deoxy-2'-fluorocytidine-3'-phosphate
  modified_base 10: mod_base = OTHER; note = 2'-O-methyluridine-3'-phosphate
  modified_base 11: mod_base = OTHER; note = 2'-O-methyluridine-3'-phosphate
  modified_base 12: mod_base = OTHER; note = 2'-O-methylguanosine-3'-phosphate
  modified_base 13: mod_base = OTHER; note = 2'-O-methylguanosine-3'-phosphate
  modified_base 14: mod_base = OTHER; note = 2'-deoxy-2'-fluoroadenosine-3'-phosphate
  modified_base 15: mod_base = OTHER; note = 2'-O-methylcytidine-3'-phosphate
  modified_base 16: mod_base = OTHER; note = 2'-deoxy-2'-fluorouridine-3'-phosphate
  modified_base 17: mod_base = OTHER; note = 2'-O-methyluridine-3'-phosphate
  modified_base 18: mod_base = OTHER; note = 2'-O-methylguanosine-3'-phosphate
  modified_base 19: mod_base = OTHER; note = 2'-O-methylguanosine-3'-phosphate
  modified_base 20: mod_base = OTHER; note = 2'-O-methylguanosine-3'-phosphate
  modified_base 21: mod_base = OTHER; note = 2'-O-methyluridine-3'-phosphorothioate
  modified_base 22: mod_base = OTHER; note = 2'-O-methyluridine-3'-phosphorothioate
  modified_base 23: mod_base = OTHER; note = 2'-O-methylcytidine
atggtatgcttggacttgggttc

SEQ ID NO: 1423 - RNA, 23 nt, synthetic construct
  source 1..23: mol_type = other RNA
  modified_base 1: mod_base = OTHER; note = 2'-O-methyladenosine-3'-phosphorothioate
  modified_base 2: mod_base = OTHER; note = 2'-deoxy-2'-fluorouridine-3'-phosphorothioate
  modified_base 3: mod_base = OTHER; note = 2'-O-methylcytidine-3'-phosphate
  modified_base 4: mod_base = OTHER; note = 2'-O-methylguanosine-3'-phosphate
  modified_base 5: mod_base = OTHER; note = 2'-O-methyluridine-3'-phosphate
  modified_base 6: mod_base = OTHER; note = 2'-deoxy-2'-fluoroguanosine-3'-phosphate
  modified_base 7: mod_base = OTHER; note = 2'-O-methyluridine-3'-phosphate
  modified_base 8: mod_base = OTHER; note = 2'-deoxy-2'-fluorouridine-3'-phosphate
  modified_base 9: mod_base = OTHER; note = 2'-deoxy-2'-fluoroguanosine-3'-phosphate
  modified_base 10: mod_base = OTHER; note = 2'-O-methylguanosine-3'-phosphate
  modified_base 11: mod_base = OTHER; note = 2'-O-methyluridine-3'-phosphate
  modified_base 12: mod_base = OTHER; note = 2'-O-methyladenosine-3'-phosphate
  modified_base 13: mod_base = OTHER; note = 2'-O-methyluridine-3'-phosphate
  modified_base 14: mod_base = OTHER; note = 2'-deoxy-2'-fluoroguanosine-3'-phosphate
  modified_base 15: mod_base = OTHER; note = 2'-O-methylcytidine-3'-phosphate
  modified_base 16: mod_base = OTHER; note = 2'-deoxy-2'-fluorouridine-3'-phosphate
  modified_base 17: mod_base = OTHER; note = 2'-O-methyluridine-3'-phosphate
  modified_base 18: mod_base = OTHER; note = 2'-O-methylguanosine-3'-phosphate
  modified_base 19: mod_base = OTHER; note = 2'-O-methylguanosine-3'-phosphate
  modified_base 20: mod_base = OTHER; note = 2'-O-methyladenosine-3'-phosphate
  modified_base 21: mod_base = OTHER; note = 2'-O-methylcytidine-3'-phosphorothioate
  modified_base 22: mod_base = OTHER; note = 2'-O-methyluridine-3'-phosphorothioate
  modified_base 23: mod_base = OTHER; note = 2'-O-methyluridine
atcgtgttggtatgcttggactt

SEQ ID NO: 1424 - RNA, 23 nt, synthetic construct
  source 1..23: mol_type = other RNA
  modified_base 1: mod_base = OTHER; note = 2'-O-methyladenosine-3'-phosphorothioate
  modified_base 2: mod_base = OTHER; note = 2'-deoxy-2'-fluoroadenosine-3'-phosphorothioate
  modified_base 3: mod_base = OTHER; note = 2'-O-methylcytidine-3'-phosphate
  modified_base 4: mod_base = OTHER; note = 2'-O-methyladenosine-3'-phosphate
  modified_base 5: mod_base = OTHER; note = 2'-O-methylguanosine-3'-phosphate
  modified_base 6: mod_base = OTHER; note = 2'-deoxy-2'-fluorouridine-3'-phosphate
  modified_base 7: mod_base = OTHER; note = 2'-O-methyladenosine-3'-phosphate
  modified_base 8: mod_base = OTHER; note = 2'-deoxy-2'-fluoroguanosine-3'-phosphate
  modified_base 9: mod_base = OTHER; note = 2'-deoxy-2'-fluorocytidine-3'-phosphate
  modified_base 10: mod_base = OTHER; note = 2'-O-methylcytidine-3'-phosphate
  modified_base 11: mod_base = OTHER; note = 2'-O-methyluridine-3'-phosphate
  modified_base 12: mod_base = OTHER; note = 2'-O-methylguanosine-3'-phosphate
  modified_base 13: mod_base = OTHER; note = 2'-O-methylcytidine-3'-phosphate
  modified_base 14: mod_base = OTHER; note = 2'-deoxy-2'-fluorouridine-3'-phosphate
  modified_base 15: mod_base = OTHER; note = 2'-O-methylcytidine-3'-phosphate
  modified_base 16: mod_base = OTHER; note = 2'-deoxy-2'-fluoroguanosine-3'-phosphate
  modified_base 17: mod_base = OTHER; note = 2'-O-methyluridine-3'-phosphate
  modified_base 18: mod_base = OTHER; note = 2'-O-methylguanosine-3'-phosphate
  modified_base 19: mod_base = OTHER; note = 2'-O-methyluridine-3'-phosphate
  modified_base 20: mod_base = OTHER; note = 2'-O-methyluridine-3'-phosphate
  modified_base 21: mod_base = OTHER; note = 2'-O-methylguanosine-3'-phosphorothioate
  modified_base 22: mod_base = OTHER; note = 2'-O-methylguanosine-3'-phosphorothioate
  modified_base 23: mod_base = OTHER; note = 2'-O-methyluridine
aacagtagcctgctcgtgttggt

SEQ ID NO: 1425 - RNA, 23 nt, synthetic construct
  source 1..23: mol_type = other RNA
  modified_base 1: mod_base = OTHER; note = 2'-O-methyladenosine-3'-phosphorothioate
  modified_base 2: mod_base = OTHER; note = 2'-deoxy-2'-fluoroguanosine-3'-phosphorothioate
  modified_base 3: mod_base = OTHER; note = 2'-O-methyladenosine-3'-phosphate
  modified_base 4: mod_base = OTHER; note = 2'-O-methylguanosine-3'-phosphate
  modified_base 5: mod_base = OTHER; note = 2'-O-methylcytidine-3'-phosphate
  modified_base 6: mod_base = OTHER; note = 2'-deoxy-2'-fluorouridine-3'-phosphate
  modified_base 7: mod_base = OTHER; note = 2'-O-methylguanosine-3'-phosphate
  modified_base 8: mod_base = OTHER; note = 2'-deoxy-2'-fluoroadenosine-3'-phosphate
  modified_base 9: mod_base = OTHER; note = 2'-deoxy-2'-fluorocytidine-3'-phosphate
  modified_base 10: mod_base = OTHER; note = 2'-O-methyladenosine-3'-phosphate
  modified_base 11: mod_base = OTHER; note = 2'-O-methylguanosine-3'-phosphate
  modified_base 12: mod_base = OTHER; note = 2'-O-methyluridine-3'-phosphate
  modified_base 13: mod_base = OTHER; note = 2'-O-methyladenosine-3'-phosphate
  modified_base 14: mod_base = OTHER; note = 2'-deoxy-2'-fluoroguanosine-3'-phosphate
  modified_base 15: mod_base = OTHER; note = 2'-O-methylcytidine-3'-phosphate
  modified_base 16: mod_base = OTHER; note = 2'-deoxy-2'-fluorocytidine-3'-phosphate
  modified_base 17: mod_base = OTHER; note = 2'-O-methyluridine-3'-phosphate
  modified_base 18: mod_base = OTHER; note = 2'-O-methylguanosine-3'-phosphate
  modified_base 19: mod_base = OTHER; note = 2'-O-methylcytidine-3'-phosphate
  modified_base 20: mod_base = OTHER; note = 2'-O-methyluridine-3'-phosphate
  modified_base 21: mod_base = OTHER; note = 2'-O-methylcytidine-3'-phosphorothioate
  modified_base 22: mod_base = OTHER; note = 2'-O-methylguanosine-3'-phosphorothioate
  modified_base 23: mod_base = OTHER; note = 2'-O-methyluridine
agagctgacagtagcctgctcgt

SEQ ID NO: 1426 - RNA, 23 nt, synthetic construct
  source 1..23: mol_type = other RNA
  modified_base 1: mod_base = OTHER; note = 2'-O-methyladenosine-3'-phosphorothioate
  modified_base 2: mod_base = OTHER; note = 2'-deoxy-2'-fluorocytidine-3'-phosphorothioate
  modified_base 3: mod_base = OTHER; note = 2'-O-methyluridine-3'-phosphate
  modified_base 4: mod_base = OTHER; note = 2'-O-methylguanosine-3'-phosphate
  modified_base 5: mod_base = OTHER; note = 2'-O-methyluridine-3'-phosphate
  modified_base 6: mod_base = OTHER; note = 2'-deoxy-2'-fluoroguanosine-3'-phosphate
  modified_base 7: mod_base = OTHER; note = 2'-O-methyladenosine-3'-phosphate
  modified_base 8: mod_base = OTHER; note = 2'-deoxy-2'-fluoroadenosine-3'-phosphate
  modified_base 9: mod_base = OTHER; note = 2'-deoxy-2'-fluorocytidine-3'-phosphate
  modified_base 10: mod_base = OTHER; note = 2'-O-methyladenosine-3'-phosphate
  modified_base 11: mod_base = OTHER; note = 2'-O-methylguanosine-3'-phosphate
  modified_base 12: mod_base = OTHER; note = 2'-O-methylcytidine-3'-phosphate
  modified_base 13: mod_base = OTHER; note = 2'-O-methyluridine-3'-phosphate
  modified_base 14: mod_base = OTHER; note = 2'-deoxy-2'-fluorocytidine-3'-phosphate
  modified_base 15: mod_base = OTHER; note = 2'-O-methyluridine-3'-phosphate
  modified_base 16: mod_base = OTHER; note = 2'-deoxy-2'-fluorouridine-3'-phosphate
  modified_base 17: mod_base = OTHER; note = 2'-O-methylcytidine-3'-phosphate
  modified_base 18: mod_base = OTHER; note = 2'-O-methyluridine-3'-phosphate
  modified_base 19: mod_base = OTHER; note = 2'-O-methylcytidine-3'-phosphate
  modified_base 20: mod_base = OTHER; note = 2'-O-methylcytidine-3'-phosphate
  modified_base 21: mod_base = OTHER; note = 2'-O-methylguanosine-3'-phosphorothioate
  modified_base 22: mod_base = OTHER; note = 2'-O-methyladenosine-3'-phosphorothioate
  modified_base 23: mod_base = OTHER; note = 2'-O-methylguanosine
actgtgaacagctcttctccgag

SEQ ID NO: 1427 - RNA, 23 nt, synthetic construct
  source 1..23: mol_type = other RNA
  modified_base 1: mod_base = OTHER; note = 2'-O-methyladenosine-3'-phosphorothioate
  modified_base 2: mod_base = OTHER; note = 2'-deoxy-2'-fluoroadenosine-3'-phosphorothioate
  modified_base 3: mod_base = OTHER; note = 2'-O-methylguanosine-3'-phosphate
  modified_base 4: mod_base = OTHER; note = 2'-O-methyluridine-3'-phosphate
  modified_base 5: mod_base = OTHER; note = 2'-O-methylcytidine-3'-phosphate
  modified_base 6: mod_base = OTHER; note = 2'-deoxy-2'-fluorouridine-3'-phosphate
  modified_base 7: mod_base = OTHER; note = 2'-O-methylguanosine-3'-phosphate
  modified_base 8: mod_base = OTHER; note = 2'-deoxy-2'-fluoroguanosine-3'-phosphate
  modified_base 9: mod_base = OTHER; note = 2'-deoxy-2'-fluorocytidine-3'-phosphate
  modified_base 10: mod_base = OTHER; note = 2'-O-methyluridine-3'-phosphate
  modified_base 11: mod_base = OTHER; note = 2'-O-methylguanosine-3'-phosphate
  modified_base 12: mod_base = OTHER; note = 2'-O-methyluridine-3'-phosphate
  modified_base 13: mod_base = OTHER; note = 2'-O-methylguanosine-3'-phosphate
  modified_base 14: mod_base = OTHER; note = 2'-deoxy-2'-fluoroadenosine-3'-phosphate
  modified_base 15: mod_base = OTHER; note = 2'-O-methyladenosine-3'-phosphate
  modified_base 16: mod_base = OTHER; note = 2'-deoxy-2'-fluorocytidine-3'-phosphate
  modified_base 17: mod_base = OTHER; note = 2'-O-methyladenosine-3'-phosphate
  modified_base 18: mod_base = OTHER; note = 2'-O-methylguanosine-3'-phosphate
  modified_base 19: mod_base = OTHER; note = 2'-O-methylcytidine-3'-phosphate
  modified_base 20: mod_base = OTHER; note = 2'-O-methyluridine-3'-phosphate
  modified_base 21: mod_base = OTHER; note = 2'-O-methylcytidine-3'-phosphorothioate
  modified_base 22: mod_base = OTHER; note = 2'-O-methyluridine-3'-phosphorothioate
  modified_base 23: mod_base = OTHER; note = 2'-O-methyluridine
aagtctggctgtgaacagctctt

SEQ ID NO: 1428 - RNA, 23 nt, synthetic construct
  source 1..23: mol_type = other RNA
  modified_base 1: mod_base = OTHER; note = 2'-O-methyladenosine-3'-phosphorothioate
  modified_base 2: mod_base = OTHER; note = 2'-deoxy-2'-fluoroadenosine-3'-phosphorothioate
  modified_base 3: mod_base = OTHER; note = 2'-O-methyladenosine-3'-phosphate
  modified_base 4: mod_base = OTHER; note = 2'-O-methylcytidine-3'-phosphate
  modified_base 5: mod_base = OTHER; note = 2'-O-methyluridine-3'-phosphate
  modified_base 6: mod_base = OTHER; note = 2'-deoxy-2'-fluoroguanosine-3'-phosphate
  modified_base 7: mod_base = OTHER; note = 2'-O-methyluridine-3'-phosphate
  modified_base 8: mod_base = OTHER; note = 2'-deoxy-2'-fluoroguanosine-3'-phosphate
  modified_base 9: mod_base = OTHER; note = 2'-deoxy-2'-fluorocytidine-3'-phosphate
  modified_base 10: mod_base = OTHER; note = 2'-O-methylcytidine-3'-phosphate
  modified_base 11: mod_base = OTHER; note = 2'-O-methyladenosine-3'-phosphate
  modified_base 12: mod_base = OTHER; note = 2'-O-methylguanosine-3'-phosphate
  modified_base 13: mod_base = OTHER; note = 2'-O-methyluridine-3'-phosphate
  modified_base 14: mod_base = OTHER; note = 2'-deoxy-2'-fluorocytidine-3'-phosphate
  modified_base 15: mod_base = OTHER; note = 2'-O-methyluridine-3'-phosphate
  modified_base 16: mod_base = OTHER; note = 2'-deoxy-2'-fluoroguanosine-3'-phosphate
  modified_base 17: mod_base = OTHER; note = 2'-O-methylguanosine-3'-phosphate
  modified_base 18: mod_base = OTHER; note = 2'-O-methylcytidine-3'-phosphate
  modified_base 19: mod_base = OTHER; note = 2'-O-methyluridine-3'-phosphate
  modified_base 20: mod_base = OTHER; note = 2'-O-methylguanosine-3'-phosphate
  modified_base 21: mod_base = OTHER; note = 2'-O-methyluridine-3'-phosphorothioate
  modified_base 22: mod_base = OTHER; note = 2'-O-methylguanosine-3'-phosphorothioate
  modified_base 23: mod_base = OTHER; note = 2'-O-methyladenosine
aaactgtgccagtctggctgtga

SEQ ID NO: 1429 - RNA, 23 nt, synthetic construct
  source 1..23: mol_type = other RNA
  modified_base 1: mod_base = OTHER; note = 2'-O-methyladenosine-3'-phosphorothioate
  modified_base 2: mod_base = OTHER; note = 2'-deoxy-2'-fluorouridine-3'-phosphorothioate
  modified_base 3: mod_base = OTHER; note = 2'-O-methyluridine-3'-phosphate
  modified_base 4: mod_base = OTHER; note = 2'-O-methyluridine-3'-phosphate
  modified_base 5: mod_base = OTHER; note = 2'-O-methylcytidine-3'-phosphate
  modified_base 6: mod_base = OTHER; note = 2'-deoxy-2'-fluorouridine-3'-phosphate
  modified_base 7: mod_base = OTHER; note = 2'-O-methylcytidine-3'-phosphate
  modified_base 8: mod_base = OTHER; note = 2'-deoxy-2'-fluoroadenosine-3'-phosphate
  modified_base 9: mod_base = OTHER; note = 2'-deoxy-2'-fluoroguanosine-3'-phosphate
  modified_base 10: mod_base = OTHER; note = 2'-O-methyladenosine-3'-phosphate
  modified_base 11: mod_base = OTHER; note = 2'-O-methyladenosine-3'-phosphate
  modified_base 12: mod_base = OTHER; note = 2'-O-methyladenosine-3'-phosphate
  modified_base 13: mod_base = OTHER; note = 2'-O-methyladenosine-3'-phosphate
  modified_base 14: mod_base = OTHER; note = 2'-deoxy-2'-fluorocytidine-3'-phosphate
  modified_base 15: mod_base = OTHER; note = 2'-O-methyluridine-3'-phosphate
  modified_base 16: mod_base = OTHER; note = 2'-deoxy-2'-fluoroguanosine-3'-phosphate
  modified_base 17: mod_base = OTHER; note = 2'-O-methyluridine-3'-phosphate
  modified_base 18: mod_base = OTHER; note = 2'-O-methylguanosine-3'-phosphate
  modified_base 19: mod_base = OTHER; note = 2'-O-methylcytidine-3'-phosphate
  modified_base 20: mod_base = OTHER; note = 2'-O-methylcytidine-3'-phosphate
  modified_base 21: mod_base = OTHER; note = 2'-O-methyladenosine-3'-phosphorothioate
  modified_base 22: mod_base = OTHER; note = 2'-O-methylguanosine-3'-phosphorothioate
  modified_base 23: mod_base = OTHER; note = 2'-O-methyluridine
atttctcagaaaactgtgccagt

SEQ ID NO: 1430 - RNA, 23 nt, synthetic construct
  source 1..23: mol_type = other RNA
  modified_base 1: mod_base = OTHER; note = 2'-O-methyladenosine-3'-phosphorothioate
  modified_base 2: mod_base = OTHER; note = 2'-deoxy-2'-fluoroadenosine-3'-phosphorothioate
  modified_base 3: mod_base = OTHER; note = 2'-O-methyluridine-3'-phosphate
  modified_base 4: mod_base = OTHER; note = 2'-O-methyladenosine-3'-phosphate
  modified_base 5: mod_base = OTHER; note = 2'-O-methylguanosine-3'-phosphate
  modified_base 6: mod_base = OTHER; note = 2'-deoxy-2'-fluorouridine-3'-phosphate
  modified_base 7: mod_base = OTHER; note = 2'-O-methylcytidine-3'-phosphate
  modified_base 8: mod_base = OTHER; note = 2'-deoxy-2'-fluorouridine-3'-phosphate
  modified_base 9: mod_base = OTHER; note = 2'-deoxy-2'-fluorouridine-3'-phosphate
  modified_base 10: mod_base = OTHER; note = 2'-O-methyluridine-3'-phosphate
  modified_base 11: mod_base = OTHER; note = 2'-O-methylcytidine-3'-phosphate
  modified_base 12: mod_base = OTHER; note = 2'-O-methyluridine-3'-phosphate
  modified_base 13: mod_base = OTHER; note = 2'-O-methylcytidine-3'-phosphate
  modified_base 14: mod_base = OTHER; note = 2'-deoxy-2'-fluoroadenosine-3'-phosphate
  modified_base 15: mod_base = OTHER; note = 2'-O-methylguanosine-3'-phosphate
  modified_base 16: mod_base = OTHER; note = 2'-deoxy-2'-fluoroadenosine-3'-phosphate
  modified_base 17: mod_base = OTHER; note = 2'-O-methyladenosine-3'-phosphate
  modified_base 18: mod_base = OTHER; note = 2'-O-methyladenosine-3'-phosphate
  modified_base 19: mod_base = OTHER; note = 2'-O-methyladenosine-3'-phosphate
  modified_base 20: mod_base = OTHER; note = 2'-O-methylcytidine-3'-phosphate
  modified_base 21: mod_base = OTHER; note = 2'-O-methyluridine-3'-phosphorothioate
  modified_base 22: mod_base = OTHER; note = 2'-O-methylguanosine-3'-phosphorothioate
  modified_base 23: mod_base = OTHER; note = 2'-O-methyluridine
aatagtctttctcagaaaactgt

SEQ ID NO: 1431 - RNA, 23 nt, synthetic construct
  source 1..23: mol_type = other RNA
  modified_base 1: mod_base = OTHER; note = 2'-O-methyladenosine-3'-phosphorothioate
  modified_base 2: mod_base = OTHER; note = 2'-deoxy-2'-fluoroguanosine-3'-phosphorothioate
  modified_base 3: mod_base = OTHER; note = 2'-O-methyluridine-3'-phosphate
  modified_base 4: mod_base = OTHER; note = 2'-O-methyluridine-3'-phosphate
  modified_base 5: mod_base = OTHER; note = 2'-O-methyluridine-3'-phosphate
  modified_base 6: mod_base = OTHER; note = 2'-deoxy-2'-fluoroguanosine-3'-phosphate
  modified_base 7: mod_base = OTHER; note = 2'-O-methyladenosine-3'-phosphate
  modified_base 8: mod_base = OTHER; note = 2'-deoxy-2'-fluoroadenosine-3'-phosphate
  modified_base 9: mod_base = OTHER; note = 2'-deoxy-2'-fluorouridine-3'-phosphate
  modified_base 10: mod_base = OTHER; note = 2'-O-methyladenosine-3'-phosphate
  modified_base 11: mod_base = OTHER; note = 2'-O-methylguanosine-3'-phosphate
  modified_base 12: mod_base = OTHER; note = 2'-O-methyluridine-3'-phosphate
  modified_base 13: mod_base = OTHER; note = 2'-O-methylcytidine-3'-phosphate
  modified_base 14: mod_base = OTHER; note = 2'-deoxy-2'-fluorouridine-3'-phosphate
  modified_base 15: mod_base = OTHER; note = 2'-O-methyluridine-3'-phosphate
  modified_base 16: mod_base = OTHER; note = 2'-deoxy-2'-fluorouridine-3'-phosphate
  modified_base 17: mod_base = OTHER; note = 2'-O-methylcytidine-3'-phosphate
  modified_base 18: mod_base = OTHER; note = 2'-O-methyluridine-3'-phosphate
  modified_base 19: mod_base = OTHER; note = 2'-O-methylcytidine-3'-phosphate
  modified_base 20: mod_base = OTHER; note = 2'-O-methyladenosine-3'-phosphate
  modified_base 21: mod_base = OTHER; note = 2'-O-methylguanosine-3'-phosphorothioate
  modified_base 22: mod_base = OTHER; note = 2'-O-methyladenosine-3'-phosphorothioate
  modified_base 23: mod_base = OTHER; note = 2'-O-methyladenosine
agtttgaatagtctttctcagaa

SEQ ID NO: 1432 - RNA, 23 nt, synthetic construct
  source 1..23: mol_type = other RNA
  modified_base 1: mod_base = OTHER; note = 2'-O-methyladenosine-3'-phosphorothioate
  modified_base 2: mod_base = OTHER; note = 2'-deoxy-2'-fluoroguanosine-3'-phosphorothioate
  modified_base 3: mod_base = OTHER; note = 2'-O-methyladenosine-3'-phosphate
  modified_base 4: mod_base = OTHER; note = 2'-O-methylguanosine-3'-phosphate
  modified_base 5: mod_base = OTHER; note = 2'-O-methyladenosine-3'-phosphate
  modified_base 6: mod_base = OTHER; note = 2'-deoxy-2'-fluorocytidine-3'-phosphate
  modified_base 7: mod_base = OTHER; note = 2'-O-methyluridine-3'-phosphate
  modified_base 8: mod_base = OTHER; note = 2'-deoxy-2'-fluoroguanosine-3'-phosphate
  modified_base 9: mod_base = OTHER; note = 2'-deoxy-2'-fluorouridine-3'-phosphate
  modified_base 10: mod_base = OTHER; note = 2'-O-methyluridine-3'-phosphate
  modified_base 11: mod_base = OTHER; note = 2'-O-methyluridine-3'-phosphate
  modified_base 12: mod_base = OTHER; note = 2'-O-methylguanosine-3'-phosphate
  modified_base 13: mod_base = OTHER; note = 2'-O-methyladenosine-3'-phosphate
  modified_base 14: mod_base = OTHER; note = 2'-deoxy-2'-fluoroadenosine-3'-phosphate
  modified_base 15: mod_base = OTHER; note = 2'-O-methyluridine-3'-phosphate
  modified_base 16: mod_base = OTHER; note = 2'-deoxy-2'-fluoroadenosine-3'-phosphate
  modified_base 17: mod_base = OTHER; note = 2'-O-methylguanosine-3'-phosphate
  modified_base 18: mod_base = OTHER; note = 2'-O-methyluridine-3'-phosphate
  modified_base 19: mod_base = OTHER; note = 2'-O-methylcytidine-3'-phosphate
  modified_base 20: mod_base = OTHER; note = 2'-O-methyluridine-3'-phosphate
  modified_base 21: mod_base = OTHER; note = 2'-O-methyluridine-3'-phosphorothioate
  modified_base 22: mod_base = OTHER; note = 2'-O-methyluridine-3'-phosphorothioate
  modified_base 23: mod_base = OTHER; note = 2'-O-methylcytidine
agagactgtttgaatagtctttc

SEQ ID NO: 1433 - RNA, 23 nt, synthetic construct
  source 1..23: mol_type = other RNA
  modified_base 1: mod_base = OTHER; note = 2'-O-methyladenosine-3'-phosphorothioate
  modified_base 2: mod_base = OTHER; note = 2'-deoxy-2'-fluoroadenosine-3'-phosphorothioate
  modified_base 3: mod_base = OTHER; note = 2'-O-methyluridine-3'-phosphate
  modified_base 4: mod_base = OTHER; note = 2'-O-methyluridine-3'-phosphate
  modified_base 5: mod_base = OTHER; note = 2'-O-methyluridine-3'-phosphate
  modified_base 6: mod_base = OTHER; note = 2'-deoxy-2'-fluorocytidine-3'-phosphate
  modified_base 7: mod_base = OTHER; note = 2'-O-methylcytidine-3'-phosphate
  modified_base 8: mod_base = OTHER; note = 2'-deoxy-2'-fluorouridine-3'-phosphate
  modified_base 9: mod_base = OTHER; note = 2'-deoxy-2'-fluoroguanosine-3'-phosphate
  modified_base 10: mod_base = OTHER; note = 2'-O-methyladenosine-3'-phosphate
  modified_base 11: mod_base = OTHER; note = 2'-O-methylguanosine-3'-phosphate
  modified_base 12: mod_base = OTHER; note = 2'-O-methyladenosine-3'-phosphate
  modified_base 13: mod_base = OTHER; note = 2'-O-methylcytidine-3'-phosphate
  modified_base 14: mod_base = OTHER; note = 2'-deoxy-2'-fluorouridine-3'-phosphate
  modified_base 15: mod_base = OTHER; note = 2'-O-methylguanosine-3'-phosphate
  modified_base 16: mod_base = OTHER; note = 2'-deoxy-2'-fluorouridine-3'-phosphate
  modified_base 17: mod_base = OTHER; note = 2'-O-methyluridine-3'-phosphate
  modified_base 18: mod_base = OTHER; note = 2'-O-methyluridine-3'-phosphate
  modified_base 19: mod_base = OTHER; note = 2'-O-methylguanosine-3'-phosphate
  modified_base 20: mod_base = OTHER; note = 2'-O-methyladenosine-3'-phosphate
  modified_base 21: mod_base = OTHER; note = 2'-O-methyladenosine-3'-phosphorothioate
  modified_base 22: mod_base = OTHER; note = 2'-O-methyluridine-3'-phosphorothioate
  modified_base 23: mod_base = OTHER; note = 2'-O-methyladenosine
aatttcctgagactgtttgaata

SEQ ID NO: 1434 - RNA, 23 nt, synthetic construct
  source 1..23: mol_type = other RNA
  modified_base 1: mod_base = OTHER; note = 2'-O-methyladenosine-3'-phosphorothioate
  modified_base 2: mod_base = OTHER; note = 2'-deoxy-2'-fluorocytidine-3'-phosphorothioate
  modified_base 3: mod_base = OTHER; note = 2'-O-methyladenosine-3'-phosphate
  modified_base 4: mod_base = OTHER; note = 2'-O-methyluridine-3'-phosphate
  modified_base 5: mod_base = OTHER; note = 2'-O-methyladenosine-3'-phosphate
  modified_base 6: mod_base = OTHER; note = 2'-deoxy-2'-fluorouridine-3'-phosphate
  modified_base 7: mod_base = OTHER; note = 2'-O-methyluridine-3'-phosphate
  modified_base 8: mod_base = OTHER; note = 2'-deoxy-2'-fluorouridine-3'-phosphate
  modified_base 9: mod_base = OTHER; note = 2'-deoxy-2'-fluoroguanosine-3'-phosphate
  modified_base 10: mod_base = OTHER; note = 2'-O-methyladenosine-3'-phosphate
  modified_base 11: mod_base = OTHER; note = 2'-O-methyluridine-3'-phosphate
  modified_base 12: mod_base = OTHER; note = 2'-O-methyluridine-3'-phosphate
  modified_base 13: mod_base = OTHER; note = 2'-O-methyluridine-3'-phosphate
  modified_base 14: mod_base = OTHER; note = 2'-deoxy-2'-fluorocytidine-3'-phosphate
  modified_base 15: mod_base = OTHER; note = 2'-O-methylcytidine-3'-phosphate
  modified_base 16: mod_base = OTHER; note = 2'-deoxy-2'-fluorouridine-3'-phosphate
  modified_base 17: mod_base = OTHER; note = 2'-O-methylguanosine-3'-phosphate
  modified_base 18: mod_base = OTHER; note = 2'-O-methyladenosine-3'-phosphate
  modified_base 19: mod_base = OTHER; note = 2'-O-methylguanosine-3'-phosphate
  modified_base 20: mod_base = OTHER; note = 2'-O-methyladenosine-3'-phosphate
  modified_base 21: mod_base = OTHER; note = 2'-O-methylcytidine-3'-phosphorothioate
  modified_base 22: mod_base = OTHER; note = 2'-O-methyluridine-3'-phosphorothioate
  modified_base 23: mod_base = OTHER; note = 2'-O-methylguanosine
acatatttgatttcctgagactg

SEQ ID NO: 1435 - RNA, 23 nt, synthetic construct
  source 1..23: mol_type = other RNA
  modified_base 1: mod_base = OTHER; note = 2'-O-methyladenosine-3'-phosphorothioate
  modified_base 2: mod_base = OTHER; note = 2'-deoxy-2'-fluoroguanosine-3'-phosphorothioate
  modified_base 3: mod_base = OTHER; note = 2'-O-methylcytidine-3'-phosphate
  modified_base 4: mod_base = OTHER; note = 2'-O-methyluridine-3'-phosphate
  modified_base 5: mod_base = OTHER; note = 2'-O-methyluridine-3'-phosphate
  modified_base 6: mod_base = OTHER; note = 2'-deoxy-2'-fluorouridine-3'-phosphate
  modified_base 7: mod_base = OTHER; note = 2'-O-methylguanosine-3'-phosphate
  modified_base 8: mod_base = OTHER; note = 2'-deoxy-2'-fluorocytidine-3'-phosphate
  modified_base 9: mod_base = OTHER; note = 2'-deoxy-2'-fluoroadenosine-3'-phosphate
  modified_base 10: mod_base = OTHER; note = 2'-O-methyluridine-3'-phosphate
  modified_base 11: mod_base = OTHER; note = 2'-O-methyladenosine-3'-phosphate
  modified_base 12: mod_base = OTHER; note = 2'-O-methyluridine-3'-phosphate
  modified_base 13: mod_base = OTHER; note = 2'-O-methyluridine-3'-phosphate
  modified_base 14: mod_base = OTHER; note = 2'-deoxy-2'-fluorouridine-3'-phosphate
  modified_base 15: mod_base = OTHER; note = 2'-O-methylguanosine-3'-phosphate
  modified_base 16: mod_base = OTHER; note = 2'-deoxy-2'-fluoroadenosine-3'-phosphate
  modified_base 17: mod_base = OTHER; note = 2'-O-methyluridine-3'-phosphate
  modified_base 18: mod_base = OTHER; note = 2'-O-methyluridine-3'-phosphate
  modified_base 19: mod_base = OTHER; note = 2'-O-methyluridine-3'-phosphate
  modified_base 20: mod_base = OTHER; note = 2'-O-methylcytidine-3'-phosphate
  modified_base 21: mod_base = OTHER; note = 2'-O-methylcytidine-3'-phosphorothioate
  modified_base 22: mod_base = OTHER; note = 2'-O-methyluridine-3'-phosphorothioate
  modified_base 23: mod_base = OTHER; note = 2'-O-methylguanosine
agctttgcatatttgatttcctg

SEQ ID NO: 1436 - RNA, 23 nt, synthetic construct
  source 1..23: mol_type = other RNA
  modified_base 1: mod_base = OTHER; note = 2'-O-methyladenosine-3'-phosphorothioate
  modified_base 2: mod_base = OTHER; note = 2'-deoxy-2'-fluoroguanosine-3'-phosphorothioate
  modified_base 3: mod_base = OTHER; note = 2'-O-methyluridine-3'-phosphate
  modified_base 4: mod_base = OTHER; note = 2'-O-methylcytidine-3'-phosphate
  modified_base 5: mod_base = OTHER; note = 2'-O-methyladenosine-3'-phosphate
  modified_base 6: mod_base = OTHER; note = 2'-deoxy-2'-fluoroguanosine-3'-phosphate
  modified_base 7: mod_base = OTHER; note = 2'-O-methyluridine-3'-phosphate
  modified_base 8: mod_base = OTHER; note = 2'-deoxy-2'-fluoroguanosine-3'-phosphate
  modified_base 9: mod_base = OTHER; note = 2'-deoxy-2'-fluorocytidine-3'-phosphate
  modified_base 10: mod_base = OTHER; note = 2'-O-methyluridine-3'-phosphate
  modified_base 11: mod_base = OTHER; note = 2'-O-methyluridine-3'-phosphate
  modified_base 12: mod_base = OTHER; note = 2'-O-methyluridine-3'-phosphate
  modified_base 13: mod_base = OTHER; note = 2'-O-methylguanosine-3'-phosphate
  modified_base 14: mod_base = OTHER; note = 2'-deoxy-2'-fluorocytidine-3'-phosphate
  modified_base 15: mod_base = OTHER; note = 2'-O-methyladenosine-3'-phosphate
  modified_base 16: mod_base = OTHER; note = 2'-deoxy-2'-fluorouridine-3'-phosphate
  modified_base 17: mod_base = OTHER; note = 2'-O-methyladenosine-3'-phosphate
  modified_base 18: mod_base = OTHER; note = 2'-O-methyluridine-3'-phosphate
  modified_base 19: mod_base = OTHER; note = 2'-O-methyluridine-3'-phosphate
  modified_base 20: mod_base = OTHER; note = 2'-O-methyluridine-3'-phosphate
  modified_base 21: mod_base = OTHER; note = 2'-O-methylguanosine-3'-phosphorothioate
  modified_base 22: mod_base = OTHER; note = 2'-O-methyladenosine-3'-phosphorothioate
  modified_base 23: mod_base = OTHER; note = 2'-O-methyluridine
agtcagtgctttgcatatttgat

SEQ ID NO: 1437 - RNA, 23 nt, synthetic construct
  source 1..23: mol_type = other RNA
  modified_base 1: mod_base = OTHER; note = 2'-O-methyladenosine-3'-phosphorothioate
  modified_base 2: mod_base = OTHER; note = 2'-deoxy-2'-fluorouridine-3'-phosphorothioate
  modified_base 3: mod_base = OTHER; note = 2'-O-methyluridine-3'-phosphate
  modified_base 4: mod_base = OTHER; note = 2'-O-methyladenosine-3'-phosphate
  modified_base 5: mod_base = OTHER; note = 2'-O-methylguanosine-3'-phosphate
  modified_base 6: mod_base = OTHER; note = 2'-deoxy-2'-fluoroadenosine-3'-phosphate
  modified_base 7: mod_base = OTHER; note = 2'-O-methyladenosine-3'-phosphate
  modified_base 8: mod_base = OTHER; note = 2'-deoxy-2'-fluoroguanosine-3'-phosphate
  modified_base 9: mod_base = OTHER; note = 2'-deoxy-2'-fluorouridine-3'-phosphate
  modified_base 10: mod_base = OTHER; note = 2'-O-methylcytidine-3'-phosphate
  modified_base 11: mod_base = OTHER; note = 2'-O-methyladenosine-3'-phosphate
  modified_base 12: mod_base = OTHER; note = 2'-O-methylguanosine-3'-phosphate
  modified_base 13: mod_base = OTHER; note = 2'-O-methyluridine-3'-phosphate
  modified_base 14: mod_base = OTHER; note = 2'-deoxy-2'-fluoroguanosine-3'-phosphate
  modified_base 15: mod_base = OTHER; note = 2'-O-methylcytidine-3'-phosphate
  modified_base 16: mod_base = OTHER; note = 2'-deoxy-2'-fluorouridine-3'-phosphate
  modified_base 17: mod_base = OTHER; note = 2'-O-methyluridine-3'-phosphate
  modified_base 18: mod_base = OTHER; note = 2'-O-methyluridine-3'-phosphate
  modified_base 19: mod_base = OTHER; note = 2'-O-methylguanosine-3'-phosphate
  modified_base 20: mod_base = OTHER; note = 2'-O-methylcytidine-3'-phosphate
  modified_base 21: mod_base = OTHER; note = 2'-O-methyladenosine-3'-phosphorothioate
  modified_base 22: mod_base = OTHER; note = 2'-O-methyluridine-3'-phosphorothioate
  modified_base 23: mod_base = OTHER; note = 2'-O-methyladenosine
attagaagtcagtgctttgcata

SEQ ID NO: 1438 - RNA, 23 nt, synthetic construct
  source 1..23: mol_type = other RNA
  modified_base 1: mod_base = OTHER; note = 2'-O-methyladenosine-3'-phosphorothioate
  modified_base 2: mod_base = OTHER; note = 2'-deoxy-2'-fluorouridine-3'-phosphorothioate
  modified_base 3: mod_base = OTHER; note = 2'-O-methyluridine-3'-phosphate
  modified_base 4: mod_base = OTHER; note = 2'-O-methyluridine-3'-phosphate
  modified_base 5: mod_base = OTHER; note = 2'-O-methyluridine-3'-phosphate
  modified_base 6: mod_base = OTHER; note = 2'-deoxy-2'-fluoroadenosine-3'-phosphate
  modified_base 7: mod_base = OTHER; note = 2'-O-methylcytidine-3'-phosphate
  modified_base 8: mod_base = OTHER; note = 2'-deoxy-2'-fluorouridine-3'-phosphate
  modified_base 9: mod_base = OTHER; note = 2'-deoxy-2'-fluorouridine-3'-phosphate
  modified_base 10: mod_base = OTHER; note = 2'-O-methyladenosine-3'-phosphate
  modified_base 11: mod_base = OTHER; note = 2'-O-methylguanosine-3'-phosphate
  modified_base 12: mod_base = OTHER; note = 2'-O-methyladenosine-3'-phosphate
  modified_base 13: mod_base = OTHER; note = 2'-O-methyladenosine-3'-phosphate
  modified_base 14: mod_base = OTHER; note = 2'-deoxy-2'-fluoroguanosine-3'-phosphate
  modified_base 15: mod_base = OTHER; note = 2'-O-methyluridine-3'-phosphate
  modified_base 16: mod_base = OTHER; note = 2'-deoxy-2'-fluorocytidine-3'-phosphate
  modified_base 17: mod_base = OTHER; note = 2'-O-methyladenosine-3'-phosphate
  modified_base 18: mod_base = OTHER; note = 2'-O-methylguanosine-3'-phosphate
  modified_base 19: mod_base = OTHER; note = 2'-O-methyluridine-3'-phosphate
  modified_base 20: mod_base = OTHER; note = 2'-O-methylguanosine-3'-phosphate
  modified_base 21: mod_base = OTHER; note = 2'-O-methylcytidine-3'-phosphorothioate
  modified_base 22: mod_base = OTHER; note = 2'-O-methyluridine-3'-phosphorothioate
  modified_base 23: mod_base = OTHER; note = 2'-O-methyluridine
attttacttagaagtcagtgctt

SEQ ID NO: 1439 - RNA, 23 nt, synthetic construct
  source 1..23: mol_type = other RNA
  modified_base 1: mod_base = OTHER; note = 2'-O-methyladenosine-3'-phosphorothioate
  modified_base 2: mod_base = OTHER; note = 2'-deoxy-2'-fluorocytidine-3'-phosphorothioate
  modified_base 3: mod_base = OTHER; note = 2'-O-methyluridine-3'-phosphate
  modified_base 4: mod_base = OTHER; note = 2'-O-methylguanosine-3'-phosphate
  modified_base 5: mod_base = OTHER; note = 2'-O-methyluridine-3'-phosphate
  modified_base 6: mod_base = OTHER; note = 2'-deoxy-2'-fluoroguanosine-3'-phosphate
  modified_base 7: mod_base = OTHER; note = 2'-O-methylguanosine-3'-phosphate
  modified_base 8: mod_base = OTHER; note = 2'-deoxy-2'-fluorouridine-3'-phosphate
  modified_base 9: mod_base = OTHER; note = 2'-deoxy-2'-fluorouridine-3'-phosphate
  modified_base 10: mod_base = OTHER; note = 2'-O-methyluridine-3'-phosphate
  modified_base 11: mod_base = OTHER; note = 2'-O-methyluridine-3'-phosphate
  modified_base 12: mod_base = OTHER; note = 2'-O-methyladenosine-3'-phosphate
  modified_base 13: mod_base = OTHER; note = 2'-O-methylcytidine-3'-phosphate
  modified_base 14: mod_base = OTHER; note = 2'-deoxy-2'-fluorouridine-3'-phosphate
  modified_base 15: mod_base = OTHER; note = 2'-O-methyluridine-3'-phosphate
  modified_base 16: mod_base = OTHER; note = 2'-deoxy-2'-fluoroadenosine-3'-phosphate
  modified_base 17: mod_base = OTHER; note = 2'-O-methylguanosine-3'-phosphate
  modified_base 18: mod_base = OTHER; note = 2'-O-methyladenosine-3'-phosphate
  modified_base 19: mod_base = OTHER; note = 2'-O-methyladenosine-3'-phosphate
  modified_base 20: mod_base = OTHER; note = 2'-O-methylguanosine-3'-phosphate
  modified_base 21: mod_base = OTHER; note = 2'-O-methyluridine-3'-phosphorothioate
  modified_base 22: mod_base = OTHER; note = 2'-O-methylcytidine-3'-phosphorothioate
  modified_base 23: mod_base = OTHER; note = 2'-O-methyladenosine
actgtggttttacttagaagtca

SEQ ID NO: 1440 - RNA, 23 nt, synthetic construct
  source 1..23: mol_type = other RNA
  modified_base 1: mod_base = OTHER; note = 2'-O-methyladenosine-3'-phosphorothioate
  modified_base 2: mod_base = OTHER; note = 2'-deoxy-2'-fluorouridine-3'-phosphorothioate
  modified_base 3: mod_base = OTHER; note = 2'-O-methyluridine-3'-phosphate
  modified_base 4: mod_base = OTHER; note = 2'-O-methylcytidine-3'-phosphate
  modified_base 5: mod_base = OTHER; note = 2'-O-methyladenosine-3'-phosphate
  modified_base 6: mod_base = OTHER; note = 2'-deoxy-2'-fluoroadenosine-3'-phosphate
  modified_base 7: mod_base = OTHER; note = 2'-O-methylcytidine-3'-phosphate
  modified_base 8: mod_base = OTHER; note = 2'-deoxy-2'-fluorouridine-3'-phosphate
  modified_base 9: mod_base = OTHER; note = 2'-deoxy-2'-fluoroguanosine-3'-phosphate
  modified_base 10: mod_base = OTHER; note = 2'-O-methylcytidine-3'-phosphate
  modified_base 11: mod_base = OTHER; note = 2'-O-methyluridine-3'-phosphate
  modified_base 12: mod_base = OTHER; note = 2'-O-methylguanosine-3'-phosphate
  modified_base 13: mod_base = OTHER; note = 2'-O-methyluridine-3'-phosphate
  modified_base 14: mod_base = OTHER; note = 2'-deoxy-2'-fluoroguanosine-3'-phosphate
  modified_base 15: mod_base = OTHER; note = 2'-O-methylguanosine-3'-phosphate
  modified_base 16: mod_base = OTHER; note = 2'-deoxy-2'-fluorouridine-3'-phosphate
  modified_base 17: mod_base = OTHER; note = 2'-O-methyluridine-3'-phosphate
  modified_base 18: mod_base = OTHER; note = 2'-O-methyluridine-3'-phosphate
  modified_base 19: mod_base = OTHER; note = 2'-O-methyluridine-3'-phosphate
  modified_base 20: mod_base = OTHER; note = 2'-O-methyladenosine-3'-phosphate
  modified_base 21: mod_base = OTHER; note = 2'-O-methylcytidine-3'-phosphorothioate
  modified_base 22: mod_base = OTHER; note = 2'-O-methyluridine-3'-phosphorothioate
  modified_base 23: mod_base = OTHER; note = 2'-O-methyluridine
attcaactgctgtggttttactt

SEQ ID NO: 1441 - RNA, 23 nt, synthetic construct
  source 1..23: mol_type = other RNA
  modified_base 1: mod_base = OTHER; note = 2'-O-methyladenosine-3'-phosphorothioate
  modified_base 2: mod_base = OTHER; note = 2'-deoxy-2'-fluoroadenosine-3'-phosphorothioate
  modified_base 3: mod_base = OTHER; note = 2'-O-methylguanosine-3'-phosphate
  modified_base 4: mod_base = OTHER; note = 2'-O-methyluridine-3'-phosphate
  modified_base 5: mod_base = OTHER; note = 2'-O-methylcytidine-3'-phosphate
  modified_base 6: mod_base = OTHER; note = 2'-deoxy-2'-fluorouridine-3'-phosphate
  modified_base 7: mod_base = OTHER; note = 2'-O-methyluridine-3'-phosphate
  modified_base 8: mod_base = OTHER; note = 2'-deoxy-2'-fluorouridine-3'-phosphate
  modified_base 9: mod_base = OTHER; note = 2'-deoxy-2'-fluorouridine-3'-phosphate
  modified_base 10: mod_base = OTHER; note = 2'-O-methylcytidine-3'-phosphate
  modified_base 11: mod_base = OTHER; note = 2'-O-methyladenosine-3'-phosphate
  modified_base 12: mod_base = OTHER; note = 2'-O-methyladenosine-3'-phosphate
  modified_base 13: mod_base = OTHER; note = 2'-O-methylcytidine-3'-phosphate
  modified_base 14: mod_base = OTHER; note = 2'-deoxy-2'-fluorouridine-3'-phosphate
  modified_base 15: mod_base = OTHER; note = 2'-O-methylguanosine-3'-phosphate
  modified_base 16: mod_base = OTHER; note = 2'-deoxy-2'-fluorocytidine-3'-phosphate
  modified_base 17: mod_base = OTHER; note = 2'-O-methyluridine-3'-phosphate
  modified_base 18: mod_base = OTHER; note = 2'-O-methylguanosine-3'-phosphate
  modified_base 19: mod_base = OTHER; note = 2'-O-methyluridine-3'-phosphate
  modified_base 20: mod_base = OTHER; note = 2'-O-methylguanosine-3'-phosphate
  modified_base 21: mod_base = OTHER; note = 2'-O-methylguanosine-3'-phosphorothioate
  modified_base 22: mod_base = OTHER; note = 2'-O-methyluridine-3'-phosphorothioate
  modified_base 23: mod_base = OTHER; note = 2'-O-methyluridine
aagtcttttcaactgctgtggtt

SEQ ID NO: 1442 - RNA, 23 nt, synthetic construct
  source 1..23: mol_type = other RNA
  modified_base 1: mod_base = OTHER; note = 2'-O-methyladenosine-3'-phosphorothioate
  modified_base 2: mod_base = OTHER; note = 2'-deoxy-2'-fluorouridine-3'-phosphorothioate
  modified_base 3: mod_base = OTHER; note = 2'-O-methyluridine-3'-phosphate
  modified_base 4: mod_base = OTHER; note = 2'-O-methyluridine-3'-phosphate
  modified_base 5: mod_base = OTHER; note = 2'-O-methylcytidine-3'-phosphate
  modified_base 6: mod_base = OTHER; note = 2'-deoxy-2'-fluorouridine-3'-phosphate
  modified_base 7: mod_base = OTHER; note = 2'-O-methyluridine-3'-phosphate
  modified_base 8: mod_base = OTHER; note = 2'-deoxy-2'-fluorouridine-3'-phosphate
  modified_base 9: mod_base = OTHER; note = 2'-deoxy-2'-fluoroguanosine-3'-phosphate
  modified_base 10: mod_base = OTHER; note = 2'-O-methylguanosine-3'-phosphate
  modified_base 11: mod_base = OTHER; note = 2'-O-methyladenosine-3'-phosphate
  modified_base 12: mod_base = OTHER; note = 2'-O-methylguanosine-3'-phosphate
  modified_base 13: mod_base = OTHER; note = 2'-O-methyluridine-3'-phosphate
  modified_base 14: mod_base = OTHER; note = 2'-deoxy-2'-fluorocytidine-3'-phosphate
  modified_base 15: mod_base = OTHER; note = 2'-O-methyluridine-3'-phosphate
  modified_base 16: mod_base = OTHER; note = 2'-deoxy-2'-fluorouridine-3'-phosphate
  modified_base 17: mod_base = OTHER; note = 2'-O-methyluridine-3'-phosphate
  modified_base 18: mod_base = OTHER; note = 2'-O-methyluridine-3'-phosphate
  modified_base 19: mod_base = OTHER; note = 2'-O-methylcytidine-3'-phosphate
  modified_base 20: mod_base = OTHER; note = 2'-O-methyladenosine-3'-phosphate
  modified_base 21: mod_base = OTHER; note = 2'-O-methyladenosine-3'-phosphorothioate
  modified_base 22: mod_base = OTHER; note = 2'-O-methylcytidine-3'-phosphorothioate
  modified_base 23: mod_base = OTHER; note = 2'-O-methyluridine
atttctttggagtcttttcaact

SEQ ID NO: 1443 - RNA, 23 nt, synthetic construct
  source 1..23: mol_type = other RNA
  modified_base 1: mod_base = OTHER; note = 2'-O-methyladenosine-3'-phosphorothioate
  modified_base 2: mod_base = OTHER; note = 2'-deoxy-2'-fluorocytidine-3'-phosphorothioate
  modified_base 3: mod_base = OTHER; note = 2'-O-methyluridine-3'-phosphate
  modified_base 4: mod_base = OTHER; note = 2'-O-methyluridine-3'-phosphate
  modified_base 5: mod_base = OTHER; note = 2'-O-methyladenosine-3'-phosphate
  modified_base 6: mod_base = OTHER; note = 2'-deoxy-2'-fluorocytidine-3'-phosphate
  modified_base 7: mod_base = OTHER; note = 2'-O-methyladenosine-3'-phosphate
  modified_base 8: mod_base = OTHER; note = 2'-deoxy-2'-fluorouridine-3'-phosphate
  modified_base 9: mod_base = OTHER; note = 2'-deoxy-2'-fluorouridine-3'-phosphate
  modified_base 10: mod_base = OTHER; note = 2'-O-methyluridine-3'-phosphate
  modified_base 11: mod_base = OTHER; note = 2'-O-methylcytidine-3'-phosphate
  modified_base 12: mod_base = OTHER; note = 2'-O-methyluridine-3'-phosphate
  modified_base 13: mod_base = OTHER; note = 2'-O-methyluridine-3'-phosphate
  modified_base 14: mod_base = OTHER; note = 2'-deoxy-2'-fluorouridine-3'-phosphate
  modified_base 15: mod_base = OTHER; note = 2'-O-methylguanosine-3'-phosphate
  modified_base 16: mod_base = OTHER; note = 2'-deoxy-2'-fluoroguanosine-3'-phosphate
  modified_base 17: mod_base = OTHER; note = 2'-O-methyladenosine-3'-phosphate
  modified_base 18: mod_base = OTHER; note = 2'-O-methylguanosine-3'-phosphate
  modified_base 19: mod_base = OTHER; note = 2'-O-methyluridine-3'-phosphate
  modified_base 20: mod_base = OTHER; note = 2'-O-methylcytidine-3'-phosphate
  modified_base 21: mod_base = OTHER; note = 2'-O-methyluridine-3'-phosphorothioate
  modified_base 22: mod_base = OTHER; note = 2'-O-methyluridine-3'-phosphorothioate
  modified_base 23: mod_base = OTHER; note = 2'-O-methyluridine
acttacatttctttggagtcttt

SEQ ID NO: 1444 - RNA, 23 nt, synthetic construct
  source 1..23: mol_type = other RNA
  modified_base 1: mod_base = OTHER; note = 2'-O-methyladenosine-3'-phosphorothioate
  modified_base 2: mod_base = OTHER; note = 2'-deoxy-2'-fluoroadenosine-3'-phosphorothioate
  modified_base 3: mod_base = OTHER; note = 2'-O-methylguanosine-3'-phosphate
  modified_base 4: mod_base = OTHER; note = 2'-O-methyluridine-3'-phosphate
  modified_base 5: mod_base = OTHER; note = 2'-O-methyluridine-3'-phosphate
  modified_base 6: mod_base = OTHER; note = 2'-deoxy-2'-fluorouridine-3'-phosphate
  modified_base 7: mod_base = OTHER; note = 2'-O-methylcytidine-3'-phosphate
  modified_base 8: mod_base = OTHER; note = 2'-deoxy-2'-fluorocytidine-3'-phosphate
  modified_base 9: mod_base = OTHER; note = 2'-deoxy-2'-fluorocytidine-3'-phosphate
  modified_base 10: mod_base = OTHER; note = 2'-O-methyluridine-3'-phosphate
  modified_base 11: mod_base = OTHER; note = 2'-O-methyluridine-3'-phosphate
  modified_base 12: mod_base = OTHER; note = 2'-O-methyladenosine-3'-phosphate
  modified_base 13: mod_base = OTHER; note = 2'-O-methylcytidine-3'-phosphate
  modified_base 14: mod_base = OTHER; note = 2'-deoxy-2'-fluoroadenosine-3'-phosphate
  modified_base 15: mod_base = OTHER; note = 2'-O-methyluridine-3'-phosphate
  modified_base 16: mod_base = OTHER; note = 2'-deoxy-2'-fluorouridine-3'-phosphate
  modified_base 17: mod_base = OTHER; note = 2'-O-methyluridine-3'-phosphate
  modified_base 18: mod_base = OTHER; note = 2'-O-methylcytidine-3'-phosphate
  modified_base 19: mod_base = OTHER; note = 2'-O-methyluridine-3'-phosphate
  modified_base 20: mod_base = OTHER; note = 2'-O-methyluridine-3'-phosphate
  modified_base 21: mod_base = OTHER; note = 2'-O-methyluridine-3'-phosphorothioate
  modified_base 22: mod_base = OTHER; note = 2'-O-methylguanosine-3'-phosphorothioate
  modified_base 23: mod_base = OTHER; note = 2'-O-methylguanosine
aagtttcccttacatttctttgg

SEQ ID NO: 1445 - RNA, 23 nt, synthetic construct
  source 1..23: mol_type = other RNA
  modified_base 1: mod_base = OTHER; note = 2'-O-methyladenosine-3'-phosphorothioate
  modified_base 2: mod_base = OTHER; note = 2'-deoxy-2'-fluorocytidine-3'-phosphorothioate
  modified_base 3: mod_base = OTHER; note = 2'-O-methylguanosine-3'-phosphate
  modified_base 4: mod_base = OTHER; note = 2'-O-methyluridine-3'-phosphate
  modified_base 5: mod_base = OTHER; note = 2'-O-methyluridine-3'-phosphate
  modified_base 6: mod_base = OTHER; note = 2'-deoxy-2'-fluoroguanosine-3'-phosphate
  modified_base 7: mod_base = OTHER; note = 2'-O-methylcytidine-3'-phosphate
  modified_base 8: mod_base = OTHER; note = 2'-deoxy-2'-fluorouridine-3'-phosphate
  modified_base 9: mod_base = OTHER; note = 2'-deoxy-2'-fluoroguanosine-3'-phosphate
  modified_base 10: mod_base = OTHER; note = 2'-O-methylguanosine-3'-phosphate
  modified_base 11: mod_base = OTHER; note = 2'-O-methylcytidine-3'-phosphate
  modified_base 12: mod_base = OTHER; note = 2'-O-methyladenosine-3'-phosphate
  modified_base 13: mod_base = OTHER; note = 2'-O-methylguanosine-3'-phosphate
  modified_base 14: mod_base = OTHER; note = 2'-deoxy-2'-fluorouridine-3'-phosphate
  modified_base 15: mod_base = OTHER; note = 2'-O-methyluridine-3'-phosphate
  modified_base 16: mod_base = OTHER; note = 2'-deoxy-2'-fluorouridine-3'-phosphate
  modified_base 17: mod_base = OTHER; note = 2'-O-methylcytidine-3'-phosphate
  modified_base 18: mod_base = OTHER; note = 2'-O-methylcytidine-3'-phosphate
  modified_base 19: mod_base = OTHER; note = 2'-O-methylcytidine-3'-phosphate
  modified_base 20: mod_base = OTHER; note = 2'-O-methyluridine-3'-phosphate
  modified_base 21: mod_base = OTHER; note = 2'-O-methyluridine-3'-phosphorothioate
  modified_base 22: mod_base = OTHER; note = 2'-O-methyladenosine-3'-phosphorothioate
  modified_base 23: mod_base = OTHER; note = 2'-O-methylcytidine
acgttgctggcagtttcccttac

SEQ ID NO: 1446 - RNA, 23 nt, synthetic construct
  source 1..23: mol_type = other RNA
  modified_base 1: mod_base = OTHER; note = 2'-O-methyladenosine-3'-phosphorothioate
  modified_base 2: mod_base = OTHER; note = 2'-deoxy-2'-fluorocytidine-3'-phosphorothioate
  modified_base 3: mod_base = OTHER; note = 2'-O-methylcytidine-3'-phosphate
  modified_base 4: mod_base = OTHER; note = 2'-O-methyluridine-3'-phosphate
  modified_base 5: mod_base = OTHER; note = 2'-O-methyladenosine-3'-phosphate
  modified_base 6: mod_base = OTHER; note = 2'-deoxy-2'-fluorouridine-3'-phosphate
  modified_base 7: mod_base = OTHER; note = 2'-O-methyladenosine-3'-phosphate
  modified_base 8: mod_base = OTHER; note = 2'-deoxy-2'-fluoroguanosine-3'-phosphate
  modified_base 9: mod_base = OTHER; note = 2'-deoxy-2'-fluorocytidine-3'-phosphate
  modified_base 10: mod_base = OTHER; note = 2'-O-methylcytidine-3'-phosphate
  modified_base 11: mod_base = OTHER; note = 2'-O-methyladenosine-3'-phosphate
  modified_base 12: mod_base = OTHER; note = 2'-O-methyluridine-3'-phosphate
  modified_base 13: mod_base = OTHER; note = 2'-O-methyladenosine-3'-phosphate
  modified_base 14: mod_base = OTHER; note = 2'-deoxy-2'-fluoroadenosine-3'-phosphate
  modified_base 15: mod_base = OTHER; note = 2'-O-methylcytidine-3'-phosphate
  modified_base 16: mod_base = OTHER; note = 2'-deoxy-2'-fluorouridine-3'-phosphate
  modified_base 17: mod_base = OTHER; note = 2'-O-methylguanosine-3'-phosphate
  modified_base 18: mod_base = OTHER; note = 2'-O-methylguanosine-3'-phosphate
  modified_base 19: mod_base = OTHER; note = 2'-O-methylcytidine-3'-phosphate
  modified_base 20: mod_base = OTHER; note = 2'-O-methyladenosine-3'-phosphate
  modified_base 21: mod_base = OTHER; note = 2'-O-methylcytidine-3'-phosphorothioate
  modified_base 22: mod_base = OTHER; note = 2'-O-methylcytidine-3'-phosphorothioate
  modified_base 23: mod_base = OTHER; note = 2'-O-methyluridine
acctatagccataactggcacct

SEQ ID NO: 1447 - RNA, 23 nt, synthetic construct
  source 1..23: mol_type = other RNA
  modified_base 1: mod_base = OTHER; note = 2'-O-methyladenosine-3'-phosphorothioate
  modified_base 2: mod_base = OTHER; note = 2'-deoxy-2'-fluorouridine-3'-phosphorothioate
  modified_base 3: mod_base = OTHER; note = 2'-O-methyluridine-3'-phosphate
  modified_base 4: mod_base = OTHER; note = 2'-O-methyluridine-3'-phosphate
  modified_base 5: mod_base = OTHER; note = 2'-O-methylguanosine-3'-phosphate
  modified_base 6: mod_base = OTHER; note = 2'-deoxy-2'-fluorouridine-3'-phosphate
  modified_base 7: mod_base = OTHER; note = 2'-O-methyladenosine-3'-phosphate
  modified_base 8: mod_base = OTHER; note = 2'-deoxy-2'-fluoroguanosine-3'-phosphate
  modified_base 9: mod_base = OTHER; note = 2'-deoxy-2'-fluorocytidine-3'-phosphate
  modified_base 10: mod_base = OTHER; note = 2'-O-methyladenosine-3'-phosphate
  modified_base 11: mod_base = OTHER; note = 2'-O-methylcytidine-3'-phosphate
  modified_base 12: mod_base = OTHER; note = 2'-O-methylcytidine-3'-phosphate
  modified_base 13: mod_base = OTHER; note = 2'-O-methyluridine-3'-phosphate
  modified_base 14: mod_base = OTHER; note = 2'-deoxy-2'-fluoroadenosine-3'-phosphate
  modified_base 15: mod_base = OTHER; note = 2'-O-methyluridine-3'-phosphate
  modified_base 16: mod_base = OTHER; note = 2'-deoxy-2'-fluoroadenosine-3'-phosphate
  modified_base 17: mod_base = OTHER; note = 2'-O-methylguanosine-3'-phosphate
  modified_base 18: mod_base = OTHER; note = 2'-O-methylcytidine-3'-phosphate
  modified_base 19: mod_base = OTHER; note = 2'-O-methylcytidine-3'-phosphate
  modified_base 20: mod_base = OTHER; note = 2'-O-methyladenosine-3'-phosphate
  modified_base 21: mod_base = OTHER; note = 2'-O-methyluridine-3'-phosphorothioate
  modified_base 22: mod_base = OTHER; note = 2'-O-methyladenosine-3'-phosphorothioate
  modified_base 23: mod_base = OTHER; note = 2'-O-methyladenosine
atttgtagcacctatagccataa

SEQ ID NO: 1448 - RNA, 23 nt, synthetic construct
  source 1..23: mol_type = other RNA
  modified_base 1: mod_base = OTHER; note = 2'-O-methyladenosine-3'-phosphorothioate
  modified_base 2: mod_base = OTHER; note = 2'-deoxy-2'-fluorouridine-3'-phosphorothioate
  modified_base 3: mod_base = OTHER; note = 2'-O-methyluridine-3'-phosphate
  modified_base 4: mod_base = OTHER; note = 2'-O-methyluridine-3'-phosphate
  modified_base 5: mod_base = OTHER; note = 2'-O-methylcytidine-3'-phosphate
  modified_base 6: mod_base = OTHER; note = 2'-deoxy-2'-fluorocytidine-3'-phosphate
  modified_base 7: mod_base = OTHER; note = 2'-O-methylcytidine-3'-phosphate
  modified_base 8: mod_base = OTHER; note = 2'-deoxy-2'-fluoroadenosine-3'-phosphate
  modified_base 9: mod_base = OTHER; note = 2'-deoxy-2'-fluorouridine-3'-phosphate
  modified_base 10: mod_base = OTHER; note = 2'-O-methylcytidine-3'-phosphate
  modified_base 11: mod_base = OTHER; note = 2'-O-methyladenosine-3'-phosphate
  modified_base 12: mod_base = OTHER; note = 2'-O-methylcytidine-3'-phosphate
  modified_base 13: mod_base = OTHER; note = 2'-O-methylcytidine-3'-phosphate
  modified_base 14: mod_base = OTHER; note = 2'-deoxy-2'-fluorocytidine-3'-phosphate
  modified_base 15: mod_base = OTHER; note = 2'-O-methyluridine-3'-phosphate
  modified_base 16: mod_base = OTHER; note = 2'-deoxy-2'-fluorouridine-3'-phosphate
  modified_base 17: mod_base = OTHER; note = 2'-O-methylguanosine-3'-phosphate
  modified_base 18: mod_base = OTHER; note = 2'-O-methylcytidine-3'-phosphate
  modified_base 19: mod_base = OTHER; note = 2'-O-methyluridine-3'-phosphate
  modified_base 20: mod_base = OTHER; note = 2'-O-methylguanosine-3'-phosphate
  modified_base 21: mod_base = OTHER; note = 2'-O-methyluridine-3'-phosphorothioate
  modified_base 22: mod_base = OTHER; note = 2'-O-methylguanosine-3'-phosphorothioate
  modified_base 23: mod_base = OTHER; note = 2'-O-methyluridine
atttcccatcacccttgctgtgt

SEQ ID NO: 1449 - RNA, 23 nt, synthetic construct
  source 1..23: mol_type = other RNA
  modified_base 1: mod_base = OTHER; note = 2'-O-methyladenosine-3'-phosphorothioate
  modified_base 2: mod_base = OTHER; note = 2'-deoxy-2'-fluoroadenosine-3'-phosphorothioate
  modified_base 3: mod_base = OTHER; note = 2'-O-methylcytidine-3'-phosphate
  modified_base 4: mod_base = OTHER; note = 2'-O-methyladenosine-3'-phosphate
  modified_base 5: mod_base = OTHER; note = 2'-O-methyladenosine-3'-phosphate
  modified_base 6: mod_base = OTHER; note = 2'-deoxy-2'-fluorouridine-3'-phosphate
  modified_base 7: mod_base = OTHER; note = 2'-O-methylguanosine-3'-phosphate
  modified_base 8: mod_base = OTHER; note = 2'-deoxy-2'-fluorocytidine-3'-phosphate
  modified_base 9: mod_base = OTHER; note = 2'-deoxy-2'-fluorouridine-3'-phosphate
  modified_base 10: mod_base = OTHER; note = 2'-O-methyluridine-3'-phosphate
  modified_base 11: mod_base = OTHER; note = 2'-O-methyluridine-3'-phosphate
  modified_base 12: mod_base = OTHER; note = 2'-O-methylcytidine-3'-phosphate
  modified_base 13: mod_base = OTHER; note = 2'-O-methylcytidine-3'-phosphate
  modified_base 14: mod_base = OTHER; note = 2'-deoxy-2'-fluorocytidine-3'-phosphate
  modified_base 15: mod_base = OTHER; note = 2'-O-methyladenosine-3'-phosphate
  modified_base 16: mod_base = OTHER; note = 2'-deoxy-2'-fluorouridine-3'-phosphate
  modified_base 17: mod_base = OTHER; note = 2'-O-methylcytidine-3'-phosphate
  modified_base 18: mod_base = OTHER; note = 2'-O-methyladenosine-3'-phosphate
  modified_base 19: mod_base = OTHER; note = 2'-O-methylcytidine-3'-phosphate
  modified_base 20: mod_base = OTHER; note = 2'-O-methylcytidine-3'-phosphate
  modified_base 21: mod_base = OTHER; note = 2'-O-methylcytidine-3'-phosphorothioate
  modified_base 22: mod_base = OTHER; note = 2'-O-methyluridine-3'-phosphorothioate
  modified_base 23: mod_base = OTHER; note = 2'-O-methyluridine
aacaatgctttcccatcaccctt

SEQ ID NO: 1450 - RNA, 23 nt, synthetic construct
  source 1..23: mol_type = other RNA
  modified_base 1: mod_base = OTHER; note = 2'-O-methyladenosine-3'-phosphorothioate
  modified_base 2: mod_base = OTHER; note = 2'-deoxy-2'-fluoroadenosine-3'-phosphorothioate
  modified_base 3: mod_base = OTHER; note = 2'-O-methylcytidine-3'-phosphate
  modified_base 4: mod_base = OTHER; note = 2'-O-methyladenosine-3'-phosphate
  modified_base 5: mod_base = OTHER; note = 2'-O-methyluridine-3'-phosphate
  modified_base 6: mod_base = OTHER; note = 2'-deoxy-2'-fluorouridine-3'-phosphate
  modified_base 7: mod_base = OTHER; note = 2'-O-methyluridine-3'-phosphate
  modified_base 8: mod_base = OTHER; note = 2'-deoxy-2'-fluoroadenosine-3'-phosphate
  modified_base 9: mod_base = OTHER; note = 2'-deoxy-2'-fluorocytidine-3'-phosphate
  modified_base 10: mod_base = OTHER; note = 2'-O-methyladenosine-3'-phosphate
  modified_base 11: mod_base = OTHER; note = 2'-O-methyladenosine-3'-phosphate
  modified_base 12: mod_base = OTHER; note = 2'-O-methyluridine-3'-phosphate
  modified_base 13: mod_base = OTHER; note = 2'-O-methylguanosine-3'-phosphate
  modified_base 14: mod_base = OTHER; note = 2'-deoxy-2'-fluorocytidine-3'-phosphate
  modified_base 15: mod_base = OTHER; note = 2'-O-methyluridine-3'-phosphate
  modified_base 16: mod_base = OTHER; note = 2'-deoxy-2'-fluorouridine-3'-phosphate
  modified_base 17: mod_base = OTHER; note = 2'-O-methyluridine-3'-phosphate
  modified_base 18: mod_base = OTHER; note = 2'-O-methylcytidine-3'-phosphate
  modified_base 19: mod_base = OTHER; note = 2'-O-methylcytidine-3'-phosphate
  modified_base 20: mod_base = OTHER; note = 2'-O-methylcytidine-3'-phosphate
  modified_base 21: mod_base = OTHER; note = 2'-O-methyladenosine-3'-phosphorothioate
  modified_base 22: mod_base = OTHER; note = 2'-O-methyluridine-3'-phosphorothioate
  modified_base 23: mod_base = OTHER; note = 2'-O-methylcytidine
aacatttacaatgctttcccatc

SEQ ID NO: 1451 - RNA, 23 nt, synthetic construct
  source 1..23: mol_type = other RNA
  modified_base 1: mod_base = OTHER; note = 2'-O-methyladenosine-3'-phosphorothioate
  modified_base 2: mod_base = OTHER; note = 2'-deoxy-2'-fluoroadenosine-3'-phosphorothioate
  modified_base 3: mod_base = OTHER; note = 2'-O-methyladenosine-3'-phosphate
  modified_base 4: mod_base = OTHER; note = 2'-O-methyladenosine-3'-phosphate
  modified_base 5: mod_base = OTHER; note = 2'-O-methyladenosine-3'-phosphate
  modified_base 6: mod_base = OTHER; note = 2'-deoxy-2'-fluoroguanosine-3'-phosphate
  modified_base 7: mod_base = OTHER; note = 2'-O-methylcytidine-3'-phosphate
  modified_base 8: mod_base = OTHER; note = 2'-deoxy-2'-fluoroadenosine-3'-phosphate
  modified_base 9: mod_base = OTHER; note = 2'-deoxy-2'-fluorocytidine-3'-phosphate
  modified_base 10: mod_base = OTHER; note = 2'-O-methyladenosine-3'-phosphate
  modified_base 11: mod_base = OTHER; note = 2'-O-methyluridine-3'-phosphate
  modified_base 12: mod_base = OTHER; note = 2'-O-methyluridine-3'-phosphate
  modified_base 13: mod_base = OTHER; note = 2'-O-methyluridine-3'-phosphate
  modified_base 14: mod_base = OTHER; note = 2'-deoxy-2'-fluoroadenosine-3'-phosphate
  modified_base 15: mod_base = OTHER; note = 2'-O-methylcytidine-3'-phosphate
  modified_base 16: mod_base = OTHER; note = 2'-deoxy-2'-fluoroadenosine-3'-phosphate
  modified_base 17: mod_base = OTHER; note = 2'-O-methyladenosine-3'-phosphate
  modified_base 18: mod_base = OTHER; note = 2'-O-methyluridine-3'-phosphate
  modified_base 19: mod_base = OTHER; note = 2'-O-methylguanosine-3'-phosphate
  modified_base 20: mod_base = OTHER; note = 2'-O-methylcytidine-3'-phosphate
  modified_base 21: mod_base = OTHER; note = 2'-O-methyluridine-3'-phosphorothioate
  modified_base 22: mod_base = OTHER; note = 2'-O-methyluridine-3'-phosphorothioate
  modified_base 23: mod_base = OTHER; note = 2'-O-methyluridine
aaaaagcacatttacaatgcttt

SEQ ID NO: 1452 - RNA, 23 nt, synthetic construct
  source 1..23: mol_type = other RNA
  modified_base 1: mod_base = OTHER; note = 2'-O-methyladenosine-3'-phosphorothioate
  modified_base 2: mod_base = OTHER; note = 2'-deoxy-2'-fluorocytidine-3'-phosphorothioate
  modified_base 3: mod_base = OTHER; note = 2'-O-methyluridine-3'-phosphate
  modified_base 4: mod_base = OTHER; note = 2'-O-methyluridine-3'-phosphate
  modified_base 5: mod_base = OTHER; note = 2'-O-methyluridine-3'-phosphate
  modified_base 6: mod_base = OTHER; note = 2'-deoxy-2'-fluorocytidine-3'-phosphate
  modified_base 7: mod_base = OTHER; note = 2'-O-methyladenosine-3'-phosphate
  modified_base 8: mod_base = OTHER; note = 2'-deoxy-2'-fluorocytidine-3'-phosphate
  modified_base 9: mod_base = OTHER; note = 2'-deoxy-2'-fluorouridine-3'-phosphate
  modified_base 10: mod_base = OTHER; note = 2'-O-methyladenosine-3'-phosphate
  modified_base 11: mod_base = OTHER; note = 2'-O-methylguanosine-3'-phosphate
  modified_base 12: mod_base = OTHER; note = 2'-O-methylguanosine-3'-phosphate
  modified_base 13: mod_base = OTHER; note = 2'-O-methyladenosine-3'-phosphate
  modified_base 14: mod_base = OTHER; note = 2'-deoxy-2'-fluoroadenosine-3'-phosphate
  modified_base 15: mod_base = OTHER; note = 2'-O-methylcytidine-3'-phosphate
  modified_base 16: mod_base = OTHER; note = 2'-deoxy-2'-fluoroadenosine-3'-phosphate
  modified_base 17: mod_base = OTHER; note = 2'-O-methyluridine-3'-phosphate
  modified_base 18: mod_base = OTHER; note = 2'-O-methylcytidine-3'-phosphate
  modified_base 19: mod_base = OTHER; note = 2'-O-methyladenosine-3'-phosphate
  modified_base 20: mod_base = OTHER; note = 2'-O-methylguanosine-3'-phosphate
  modified_base 21: mod_base = OTHER; note = 2'-O-methyluridine-3'-phosphorothioate
  modified_base 22: mod_base = OTHER; note = 2'-O-methyladenosine-3'-phosphorothioate
  modified_base 23: mod_base = OTHER; note = 2'-O-methyluridine
actttcactaggaacatcagtat

SEQ ID NO: 1453 - RNA, 23 nt, synthetic construct
  source 1..23: mol_type = other RNA
  modified_base 1: mod_base = OTHER; note = 2'-O-methyladenosine-3'-phosphorothioate
  modified_base 2: mod_base = OTHER; note = 2'-deoxy-2'-fluorocytidine-3'-phosphorothioate
  modified_base 3: mod_base = OTHER; note = 2'-O-methyluridine-3'-phosphate
  modified_base 4: mod_base = OTHER; note = 2'-O-methylguanosine-3'-phosphate
  modified_base 5: mod_base = OTHER; note = 2'-O-methylcytidine-3'-phosphate
  modified_base 6: mod_base = OTHER; note = 2'-deoxy-2'-fluorocytidine-3'-phosphate
  modified_base 7: mod_base = OTHER; note = 2'-O-methyluridine-3'-phosphate
  modified_base 8: mod_base = OTHER; note = 2'-deoxy-2'-fluorocytidine-3'-phosphate
  modified_base 9: mod_base = OTHER; note = 2'-deoxy-2'-fluorouridine-3'-phosphate
  modified_base 10: mod_base = OTHER; note = 2'-O-methyluridine-3'-phosphate
  modified_base 11: mod_base = OTHER; note = 2'-O-methyluridine-3'-phosphate
  modified_base 12: mod_base = OTHER; note = 2'-O-methylcytidine-3'-phosphate
  modified_base 13: mod_base = OTHER; note = 2'-O-methyladenosine-3'-phosphate
  modified_base 14: mod_base = OTHER; note = 2'-deoxy-2'-fluorocytidine-3'-phosphate
  modified_base 15: mod_base = OTHER; note = 2'-O-methyluridine-3'-phosphate
  modified_base 16: mod_base = OTHER; note = 2'-deoxy-2'-fluoroadenosine-3'-phosphate
  modified_base 17: mod_base = OTHER; note = 2'-O-methylguanosine-3'-phosphate
  modified_base 18: mod_base = OTHER; note = 2'-O-methylguanosine-3'-phosphate
  modified_base 19: mod_base = OTHER; note = 2'-O-methyladenosine-3'-phosphate
  modified_base 20: mod_base = OTHER; note = 2'-O-methyladenosine-3'-phosphate
  modified_base 21: mod_base = OTHER; note = 2'-O-methylcytidine-3'-phosphorothioate
  modified_base 22: mod_base = OTHER; note = 2'-O-methyladenosine-3'-phosphorothioate
  modified_base 23: mod_base = OTHER; note = 2'-O-methyluridine
actgcctctttcactaggaacat

SEQ ID NO: 1454 - RNA, 23 nt, synthetic construct
  source 1..23: mol_type = other RNA
  modified_base 1: mod_base = OTHER; note = 2'-O-methyladenosine-3'-phosphorothioate
  modified_base 2: mod_base = OTHER; note = 2'-deoxy-2'-fluorouridine-3'-phosphorothioate
  modified_base 3: mod_base = OTHER; note = 2'-O-methyluridine-3'-phosphate
  modified_base 4: mod_base = OTHER; note = 2'-O-methyluridine-3'-phosphate
  modified_base 5: mod_base = OTHER; note = 2'-O-methylcytidine-3'-phosphate
  modified_base 6: mod_base = OTHER; note = 2'-deoxy-2'-fluoroadenosine-3'-phosphate
  modified_base 7: mod_base = OTHER; note = 2'-O-methyladenosine-3'-phosphate
  modified_base 8: mod_base = OTHER; note = 2'-deoxy-2'-fluoroguanosine-3'-phosphate
  modified_base 9: mod_base = OTHER; note = 2'-deoxy-2'-fluorocytidine-3'-phosphate
  modified_base 10: mod_base = OTHER; note = 2'-O-methyluridine-3'-phosphate
  modified_base 11: mod_base = OTHER; note = 2'-O-methylguanosine-3'-phosphate
  modified_base 12: mod_base = OTHER; note = 2'-O-methylcytidine-3'-phosphate
  modified_base 13: mod_base = OTHER; note = 2'-O-methylcytidine-3'-phosphate
  modified_base 14: mod_base = OTHER; note = 2'-deoxy-2'-fluorouridine-3'-phosphate
  modified_base 15: mod_base = OTHER; note = 2'-O-methylcytidine-3'-phosphate
  modified_base 16: mod_base = OTHER; note = 2'-deoxy-2'-fluorouridine-3'-phosphate
  modified_base 17: mod_base = OTHER; note = 2'-O-methyluridine-3'-phosphate
  modified_base 18: mod_base = OTHER; note = 2'-O-methyluridine-3'-phosphate
  modified_base 19: mod_base = OTHER; note = 2'-O-methylcytidine-3'-phosphate
  modified_base 20: mod_base = OTHER; note = 2'-O-methyladenosine-3'-phosphate
  modified_base 21: mod_base = OTHER; note = 2'-O-methylcytidine-3'-phosphorothioate
  modified_base 22: mod_base = OTHER; note = 2'-O-methyluridine-3'-phosphorothioate
  modified_base 23: mod_base = OTHER; note = 2'-O-methyladenosine
atttcaagctgcctctttcacta

SEQ ID NO: 1455 - RNA, 23 nt, synthetic construct
  source 1..23: mol_type = other RNA
  modified_base 1: mod_base = OTHER; note = 2'-O-methyladenosine-3'-phosphorothioate
  modified_base 2: mod_base = OTHER; note = 2'-deoxy-2'-fluoroadenosine-3'-phosphorothioate
  modified_base 3: mod_base = OTHER; note = 2'-O-methyluridine-3'-phosphate
  modified_base 4: mod_base = OTHER; note = 2'-O-methylcytidine-3'-phosphate
  modified_base 5: mod_base = OTHER; note = 2'-O-methyluridine-3'-phosphate
  modified_base 6: mod_base = OTHER; note = 2'-deoxy-2'-fluorocytidine-3'-phosphate
  modified_base 7: mod_base = OTHER; note = 2'-O-methyladenosine-3'-phosphate
  modified_base 8: mod_base = OTHER; note = 2'-deoxy-2'-fluoroguanosine-3'-phosphate
  modified_base 9: mod_base = OTHER; note = 2'-deoxy-2'-fluorouridine-3'-phosphate
  modified_base 10: mod_base = OTHER; note = 2'-O-methyluridine-3'-phosphate
  modified_base 11: mod_base = OTHER; note = 2'-O-methyluridine-3'-phosphate
  modified_base 12: mod_base = OTHER; note = 2'-O-methylcytidine-3'-phosphate
  modified_base 13: mod_base = OTHER; note = 2'-O-methyladenosine-3'-phosphate
  modified_base 14: mod_base = OTHER; note = 2'-deoxy-2'-fluoroadenosine-3'-phosphate
  modified_base 15: mod_base = OTHER; note = 2'-O-methylguanosine-3'-phosphate
  modified_base 16: mod_base = OTHER; note = 2'-deoxy-2'-fluorocytidine-3'-phosphate
  modified_base 17: mod_base = OTHER; note = 2'-O-methyluridine-3'-phosphate
  modified_base 18: mod_base = OTHER; note = 2'-O-methylguanosine-3'-phosphate
  modified_base 19: mod_base = OTHER; note = 2'-O-methylcytidine-3'-phosphate
  modified_base 20: mod_base = OTHER; note = 2'-O-methylcytidine-3'-phosphate
  modified_base 21: mod_base = OTHER; note = 2'-O-methyluridine-3'-phosphorothioate
  modified_base 22: mod_base = OTHER; note = 2'-O-methylcytidine-3'-phosphorothioate
  modified_base 23: mod_base = OTHER; note = 2'-O-methyluridine
aatctcagtttcaagctgcctct

SEQ ID NO: 1456 - RNA, 23 nt, synthetic construct
  source 1..23: mol_type = other RNA
  modified_base 1: mod_base = OTHER; note = 2'-O-methyladenosine-3'-phosphorothioate
  modified_base 2: mod_base = OTHER; note = 2'-deoxy-2'-fluoroadenosine-3'-phosphorothioate
  modified_base 3: mod_base = OTHER; note = 2'-O-methyluridine-3'-phosphate
  modified_base 4: mod_base = OTHER; note = 2'-O-methylguanosine-3'-phosphate
  modified_base 5: mod_base = OTHER; note = 2'-O-methyluridine-3'-phosphate
  modified_base 6: mod_base = OTHER; note = 2'-deoxy-2'-fluoroguanosine-3'-phosphate
  modified_base 7: mod_base = OTHER; note = 2'-O-methyluridine-3'-phosphate
  modified_base 8: mod_base = OTHER; note = 2'-deoxy-2'-fluorouridine-3'-phosphate
  modified_base 9: mod_base = OTHER; note = 2'-deoxy-2'-fluorocytidine-3'-phosphate
  modified_base 10: mod_base = OTHER; note = 2'-O-methyladenosine-3'-phosphate
  modified_base 11: mod_base = OTHER; note = 2'-O-methylcytidine-3'-phosphate
  modified_base 12: mod_base = OTHER; note = 2'-O-methyladenosine-3'-phosphate
  modified_base 13: mod_base = OTHER; note = 2'-O-methyluridine-3'-phosphate
  modified_base 14: mod_base = OTHER; note = 2'-deoxy-2'-fluorocytidine-3'-phosphate
  modified_base 15: mod_base = OTHER; note = 2'-O-methyluridine-3'-phosphate
  modified_base 16: mod_base = OTHER; note = 2'-deoxy-2'-fluorocytidine-3'-phosphate
  modified_base 17: mod_base = OTHER; note = 2'-O-methyladenosine-3'-phosphate
  modified_base 18: mod_base = OTHER; note = 2'-O-methylguanosine-3'-phosphate
  modified_base 19: mod_base = OTHER; note = 2'-O-methyluridine-3'-phosphate
  modified_base 20: mod_base = OTHER; note = 2'-O-methyluridine-3'-phosphate
  modified_base 21: mod_base = OTHER; note = 2'-O-methyluridine-3'-phosphorothioate
  modified_base 22: mod_base = OTHER; note = 2'-O-methylcytidine-3'-phosphorothioate
  modified_base 23: mod_base = OTHER; note = 2'-O-methyladenosine
aatgtgttcacatctcagtttca

SEQ ID NO: 1457 - RNA, 23 nt, synthetic construct
  source 1..23: mol_type = other RNA
  modified_base 1: mod_base = OTHER; note = 2'-O-methyladenosine-3'-phosphorothioate
  modified_base 2: mod_base = OTHER; note = 2'-deoxy-2'-fluoroadenosine-3'-phosphorothioate
  modified_base 3: mod_base = OTHER; note = 2'-O-methyladenosine-3'-phosphate
  modified_base 4: mod_base = OTHER; note = 2'-O-methylguanosine-3'-phosphate
  modified_base 5: mod_base = OTHER; note = 2'-O-methylcytidine-3'-phosphate
  modified_base 6: mod_base = OTHER; note = 2'-deoxy-2'-fluorouridine-3'-phosphate
  modified_base 7: mod_base = OTHER; note = 2'-O-methylguanosine-3'-phosphate
  modified_base 8: mod_base = OTHER; note = 2'-deoxy-2'-fluoroadenosine-3'-phosphate
  modified_base 9: mod_base = OTHER; note = 2'-deoxy-2'-fluorouridine-3'-phosphate
  modified_base 10: mod_base = OTHER; note = 2'-O-methylguanosine-3'-phosphate
  modified_base 11: mod_base = OTHER; note = 2'-O-methyluridine-3'-phosphate
  modified_base 12: mod_base = OTHER; note = 2'-O-methylguanosine-3'-phosphate
  modified_base 13: mod_base = OTHER; note = 2'-O-methyluridine-3'-phosphate
  modified_base 14: mod_base = OTHER; note = 2'-deoxy-2'-fluorouridine-3'-phosphate
  modified_base 15: mod_base = OTHER; note = 2'-O-methylcytidine-3'-phosphate
  modified_base 16: mod_base = OTHER; note = 2'-deoxy-2'-fluoroadenosine-3'-phosphate
  modified_base 17: mod_base = OTHER; note = 2'-O-methylcytidine-3'-phosphate
  modified_base 18: mod_base = OTHER; note = 2'-O-methyladenosine-3'-phosphate
  modified_base 19: mod_base = OTHER; note = 2'-O-methyluridine-3'-phosphate
  modified_base 20: mod_base = OTHER; note = 2'-O-methylcytidine-3'-phosphate
  modified_base 21: mod_base = OTHER; note = 2'-O-methyluridine-3'-phosphorothioate
  modified_base 22: mod_base = OTHER; note = 2'-O-methylcytidine-3'-phosphorothioate
  modified_base 23: mod_base = OTHER; note = 2'-O-methyladenosine
aaagctgatgtgttcacatctca

SEQ ID NO: 1458 - RNA, 23 nt, synthetic construct
  source 1..23: mol_type = other RNA
  modified_base 1: mod_base = OTHER; note = 2'-O-methyladenosine-3'-phosphorothioate
  modified_base 2: mod_base = OTHER; note = 2'-deoxy-2'-fluorouridine-3'-phosphorothioate
  modified_base 3: mod_base = OTHER; note = 2'-O-methyluridine-3'-phosphate
  modified_base 4: mod_base = OTHER; note = 2'-O-methyluridine-3'-phosphate
  modified_base 5: mod_base = OTHER; note = 2'-O-methyladenosine-3'-phosphate
  modified_base 6: mod_base = OTHER; note = 2'-deoxy-2'-fluoroadenosine-3'-phosphate
  modified_base 7: mod_base = OTHER; note = 2'-O-methylcytidine-3'-phosphate
  modified_base 8: mod_base = OTHER; note = 2'-deoxy-2'-fluoroadenosine-3'-phosphate
  modified_base 9: mod_base = OTHER; note = 2'-deoxy-2'-fluoroguanosine-3'-phosphate
  modified_base 10: mod_base = OTHER; note = 2'-O-methylguanosine-3'-phosphate
  modified_base 11: mod_base = OTHER; note = 2'-O-methylguanosine-3'-phosphate
  modified_base 12: mod_base = OTHER; note = 2'-O-methylcytidine-3'-phosphate
  modified_base 13: mod_base = OTHER; note = 2'-O-methyladenosine-3'-phosphate
  modified_base 14: mod_base = OTHER; note = 2'-deoxy-2'-fluoroadenosine-3'-phosphate
  modified_base 15: mod_base = OTHER; note = 2'-O-methylguanosine-3'-phosphate
  modified_base 16: mod_base = OTHER; note = 2'-deoxy-2'-fluorocytidine-3'-phosphate
  modified_base 17: mod_base = OTHER; note = 2'-O-methyluridine-3'-phosphate
  modified_base 18: mod_base = OTHER; note = 2'-O-methylguanosine-3'-phosphate
  modified_base 19: mod_base = OTHER; note = 2'-O-methyladenosine-3'-phosphate
  modified_base 20: mod_base = OTHER; note = 2'-O-methyluridine-3'-phosphate
  modified_base 21: mod_base = OTHER; note = 2'-O-methylguanosine-3'-phosphorothioate
  modified_base 22: mod_base = OTHER; note = 2'-O-methyluridine-3'-phosphorothioate
  modified_base 23: mod_base = OTHER; note = 2'-O-methylguanosine
atttaacagggcaagctgatgtg

SEQ ID NO: 1459 - RNA, 23 nt, synthetic construct
  source 1..23: mol_type = other RNA
  modified_base 1: mod_base = OTHER; note = 2'-O-methyladenosine-3'-phosphorothioate
  modified_base 2: mod_base = OTHER; note = 2'-deoxy-2'-fluorouridine-3'-phosphorothioate
  modified_base 3: mod_base = OTHER; note = 2'-O-methylcytidine-3'-phosphate
  modified_base 4: mod_base = OTHER; note = 2'-O-methyladenosine-3'-phosphate
  modified_base 5: mod_base = OTHER; note = 2'-O-methyluridine-3'-phosphate
  modified_base 6: mod_base = OTHER; note = 2'-deoxy-2'-fluorocytidine-3'-phosphate
  modified_base 7: mod_base = OTHER; note = 2'-O-methyluridine-3'-phosphate
  modified_base 8: mod_base = OTHER; note = 2'-deoxy-2'-fluorouridine-3'-phosphate
  modified_base 9: mod_base = OTHER; note = 2'-deoxy-2'-fluorouridine-3'-phosphate
  modified_base 10: mod_base = OTHER; note = 2'-O-methyluridine-3'-phosphate
  modified_base 11: mod_base = OTHER; note = 2'-O-methyladenosine-3'-phosphate
  modified_base 12: mod_base = OTHER; note = 2'-O-methyladenosine-3'-phosphate
  modified_base 13: mod_base = OTHER; note = 2'-O-methylcytidine-3'-phosphate
  modified_base 14: mod_base = OTHER; note = 2'-deoxy-2'-fluoroadenosine-3'-phosphate
  modified_base 15: mod_base = OTHER; note = 2'-O-methylguanosine-3'-phosphate
  modified_base 16: mod_base = OTHER; note = 2'-deoxy-2'-fluoroguanosine-3'-phosphate
  modified_base 17: mod_base = OTHER; note = 2'-O-methylguanosine-3'-phosphate
  modified_base 18: mod_base = OTHER; note = 2'-O-methylcytidine-3'-phosphate
  modified_base 19: mod_base = OTHER; note = 2'-O-methyladenosine-3'-phosphate
  modified_base 20: mod_base = OTHER; note = 2'-O-methyladenosine-3'-phosphate
  modified_base 21: mod_base = OTHER; note = 2'-O-methylguanosine-3'-phosphorothioate
  modified_base 22: mod_base = OTHER; note = 2'-O-methylcytidine-3'-phosphorothioate
  modified_base 23: mod_base = OTHER; note = 2'-O-methyluridine
atcatcttttaacagggcaagct

SEQ ID NO: 1460 - RNA, 23 nt, synthetic construct
  source 1..23: mol_type = other RNA
  modified_base 1: mod_base = OTHER; note = 2'-O-methyladenosine-3'-phosphorothioate
  modified_base 2: mod_base = OTHER; note = 2'-deoxy-2'-fluorocytidine-3'-phosphorothioate
  modified_base 3: mod_base = OTHER; note = 2'-O-methyladenosine-3'-phosphate
  modified_base 4: mod_base = OTHER; note = 2'-O-methyladenosine-3'-phosphate
  modified_base 5: mod_base = OTHER; note = 2'-O-methylguanosine-3'-phosphate
  modified_base 6: mod_base = OTHER; note = 2'-deoxy-2'-fluorouridine-3'-phosphate
  modified_base 7: mod_base = OTHER; note = 2'-O-methyluridine-3'-phosphate
  modified_base 8: mod_base = OTHER; note = 2'-deoxy-2'-fluoroadenosine-3'-phosphate
  modified_base 9: mod_base = OTHER; note = 2'-deoxy-2'-fluoroadenosine-3'-phosphate
  modified_base 10: mod_base = OTHER; note = 2'-O-methylguanosine-3'-phosphate
  modified_base 11: mod_base = OTHER; note = 2'-O-methyladenosine-3'-phosphate
  modified_base 12: mod_base = OTHER; note = 2'-O-methyluridine-3'-phosphate
  modified_base 13: mod_base = OTHER; note = 2'-O-methyluridine-3'-phosphate
  modified_base 14: mod_base = OTHER; note = 2'-deoxy-2'-fluorouridine-3'-phosphate
  modified_base 15: mod_base = OTHER; note = 2'-O-methylguanosine-3'-phosphate
  modified_base 16: mod_base = OTHER; note = 2'-deoxy-2'-fluorouridine-3'-phosphate
  modified_base 17: mod_base = OTHER; note = 2'-O-methylguanosine-3'-phosphate
  modified_base 18: mod_base = OTHER; note = 2'-O-methyladenosine-3'-phosphate
  modified_base 19: mod_base = OTHER; note = 2'-O-methyluridine-3'-phosphate
  modified_base 20: mod_base = OTHER; note = 2'-O-methyladenosine-3'-phosphate
  modified_base 21: mod_base = OTHER; note = 2'-O-methylcytidine-3'-phosphorothioate
  modified_base 22: mod_base = OTHER; note = 2'-O-methyladenosine-3'-phosphorothioate
  modified_base 23: mod_base = OTHER; note = 2'-O-methyladenosine
acaagttaagatttgtgatacaa

SEQ ID NO: 1461 - RNA, 23 nt, synthetic construct
  source 1..23: mol_type = other RNA
  modified_base 1: mod_base = OTHER; note = 2'-O-methyladenosine-3'-phosphorothioate
  modified_base 2: mod_base = OTHER; note = 2'-deoxy-2'-fluoroadenosine-3'-phosphorothioate
  modified_base 3: mod_base = OTHER; note = 2'-O-methylcytidine-3'-phosphate
  modified_base 4: mod_base = OTHER; note = 2'-O-methyluridine-3'-phosphate
  modified_base 5: mod_base = OTHER; note = 2'-O-methylcytidine-3'-phosphate
  modified_base 6: mod_base = OTHER; note = 2'-deoxy-2'-fluorocytidine-3'-phosphate
  modified_base 7: mod_base = OTHER; note = 2'-O-methyluridine-3'-phosphate
  modified_base 8: mod_base = OTHER; note = 2'-deoxy-2'-fluorouridine-3'-phosphate
  modified_base 9: mod_base = OTHER; note = 2'-deoxy-2'-fluorocytidine-3'-phosphate
  modified_base 10: mod_base = OTHER; note = 2'-O-methyladenosine-3'-phosphate
  modified_base 11: mod_base = OTHER; note = 2'-O-methyladenosine-3'-phosphate
  modified_base 12: mod_base = OTHER; note = 2'-O-methylguanosine-3'-phosphate
  modified_base 13: mod_base = OTHER; note = 2'-O-methyluridine-3'-phosphate
  modified_base 14: mod_base = OTHER; note = 2'-deoxy-2'-fluorouridine-3'-phosphate
  modified_base 15: mod_base = OTHER; note = 2'-O-methyladenosine-3'-phosphate
  modified_base 16: mod_base = OTHER; note = 2'-deoxy-2'-fluoroadenosine-3'-phosphate
  modified_base 17: mod_base = OTHER; note = 2'-O-methylguanosine-3'-phosphate
  modified_base 18: mod_base = OTHER; note = 2'-O-methyladenosine-3'-phosphate
  modified_base 19: mod_base = OTHER; note = 2'-O-methyluridine-3'-phosphate
  modified_base 20: mod_base = OTHER; note = 2'-O-methyluridine-3'-phosphate
  modified_base 21: mod_base = OTHER; note = 2'-O-methyluridine-3'-phosphorothioate
  modified_base 22: mod_base = OTHER; note = 2'-O-methylguanosine-3'-phosphorothioate
  modified_base 23: mod_base = OTHER; note = 2'-O-methyluridine
aactccttcaagttaagatttgt

SEQ ID NO: 1462 - RNA, 23 nt, synthetic construct
  source 1..23: mol_type = other RNA
  modified_base 1: mod_base = OTHER; note = 2'-O-methyladenosine-3'-phosphorothioate
  modified_base 2: mod_base = OTHER; note = 2'-deoxy-2'-fluorouridine-3'-phosphorothioate
  modified_base 3: mod_base = OTHER; note = 2'-O-methylguanosine-3'-phosphate
  modified_base 4: mod_base = OTHER; note = 2'-O-methylcytidine-3'-phosphate
  modified_base 5: mod_base = OTHER; note = 2'-O-methyladenosine-3'-phosphate
  modified_base 6: mod_base = OTHER; note = 2'-deoxy-2'-fluoroadenosine-3'-phosphate
  modified_base 7: mod_base = OTHER; note = 2'-O-methylguanosine-3'-phosphate
  modified_base 8: mod_base = OTHER; note = 2'-deoxy-2'-fluoroguanosine-3'-phosphate
  modified_base 9: mod_base = OTHER; note = 2'-deoxy-2'-fluoroadenosine-3'-phosphate
  modified_base 10: mod_base = OTHER; note = 2'-O-methylcytidine-3'-phosphate
  modified_base 11: mod_base = OTHER; note = 2'-O-methyluridine-3'-phosphate
  modified_base 12: mod_base = OTHER; note = 2'-O-methylcytidine-3'-phosphate
  modified_base 13: mod_base = OTHER; note = 2'-O-methylcytidine-3'-phosphate
  modified_base 14: mod_base = OTHER; note = 2'-deoxy-2'-fluorouridine-3'-phosphate
  modified_base 15: mod_base = OTHER; note = 2'-O-methyluridine-3'-phosphate
  modified_base 16: mod_base = OTHER; note = 2'-deoxy-2'-fluorocytidine-3'-phosphate
  modified_base 17: mod_base = OTHER; note = 2'-O-methyladenosine-3'-phosphate
  modified_base 18: mod_base = OTHER; note = 2'-O-methyladenosine-3'-phosphate
  modified_base 19: mod_base = OTHER; note = 2'-O-methylguanosine-3'-phosphate
  modified_base 20: mod_base = OTHER; note = 2'-O-methyluridine-3'-phosphate
  modified_base 21: mod_base = OTHER; note = 2'-O-methyluridine-3'-phosphorothioate
  modified_base 22: mod_base = OTHER; note = 2'-O-methyladenosine-3'-phosphorothioate
  modified_base 23: mod_base = OTHER; note = 2'-O-methyladenosine
atgcaaggactccttcaagttaa

SEQ ID NO: 1463 - RNA, 23 nt, synthetic construct
  source 1..23: mol_type = other RNA
  modified_base 1: mod_base = OTHER; note = 2'-O-methyladenosine-3'-phosphorothioate
  modified_base 2: mod_base = OTHER; note = 2'-deoxy-2'-fluoroadenosine-3'-phosphorothioate
  modified_base 3: mod_base = OTHER; note = 2'-O-methyladenosine-3'-phosphate
  modified_base 4: mod_base = OTHER; note = 2'-O-methyluridine-3'-phosphate
  modified_base 5: mod_base = OTHER; note = 2'-O-methyluridine-3'-phosphate
  modified_base 6: mod_base = OTHER; note = 2'-deoxy-2'-fluoroguanosine-3'-phosphate
  modified_base 7: mod_base = OTHER; note = 2'-O-methyladenosine-3'-phosphate
  modified_base 8: mod_base = OTHER; note = 2'-deoxy-2'-fluorouridine-3'-phosphate
  modified_base 9: mod_base = OTHER; note = 2'-deoxy-2'-fluoroguanosine-3'-phosphate
  modified_base 10: mod_base = OTHER; note = 2'-O-methylcytidine-3'-phosphate
  modified_base 11: mod_base = OTHER; note = 2'-O-methyladenosine-3'-phosphate
  modified_base 12: mod_base = OTHER; note = 2'-O-methyladenosine-3'-phosphate
  modified_base 13: mod_base = OTHER; note = 2'-O-methylguanosine-3'-phosphate
  modified_base 14: mod_base = OTHER; note = 2'-deoxy-2'-fluoroguanosine-3'-phosphate
  modified_base 15: mod_base = OTHER; note = 2'-O-methyladenosine-3'-phosphate
  modified_base 16: mod_base = OTHER; note = 2'-deoxy-2'-fluorocytidine-3'-phosphate
  modified_base 17: mod_base = OTHER; note = 2'-O-methyluridine-3'-phosphate
  modified_base 18: mod_base = OTHER; note = 2'-O-methylcytidine-3'-phosphate
  modified_base 19: mod_base = OTHER; note = 2'-O-methylcytidine-3'-phosphate
  modified_base 20: mod_base = OTHER; note = 2'-O-methyluridine-3'-phosphate
  modified_base 21: mod_base = OTHER; note = 2'-O-methyluridine-3'-phosphorothioate
  modified_base 22: mod_base = OTHER; note = 2'-O-methylcytidine-3'-phosphorothioate
  modified_base 23: mod_base = OTHER; note = 2'-O-methyladenosine
aaattgatgcaaggactccttca

SEQ ID NO: 1464 - RNA, 23 nt, synthetic construct
  source 1..23: mol_type = other RNA
  modified_base 1: mod_base = OTHER; note = 2'-O-methyladenosine-3'-phosphorothioate
  modified_base 2: mod_base = OTHER; note = 2'-deoxy-2'-fluoroadenosine-3'-phosphorothioate
  modified_base 3: mod_base = OTHER; note = 2'-O-methyladenosine-3'-phosphate
  modified_base 4: mod_base = OTHER; note = 2'-O-methylguanosine-3'-phosphate
  modified_base 5: mod_base = OTHER; note = 2'-O-methyladenosine-3'-phosphate
  modified_base 6: mod_base = OTHER; note = 2'-deoxy-2'-fluoroadenosine-3'-phosphate
  modified_base 7: mod_base = OTHER; note = 2'-O-methyladenosine-3'-phosphate
  modified_base 8: mod_base = OTHER; note = 2'-deoxy-2'-fluoroadenosine-3'-phosphate
  modified_base 9: mod_base = OTHER; note = 2'-deoxy-2'-fluoroadenosine-3'-phosphate
  modified_base 10: mod_base = OTHER; note = 2'-O-methyluridine-3'-phosphate
  modified_base 11: mod_base = OTHER; note = 2'-O-methyluridine-3'-phosphate
  modified_base 12: mod_base = OTHER; note = 2'-O-methylguanosine-3'-phosphate
  modified_base 13: mod_base = OTHER; note = 2'-O-methyladenosine-3'-phosphate
  modified_base 14: mod_base = OTHER; note = 2'-deoxy-2'-fluorouridine-3'-phosphate
  modified_base 15: mod_base = OTHER; note = 2'-O-methylguanosine-3'-phosphate
  modified_base 16: mod_base = OTHER; note = 2'-deoxy-2'-fluorocytidine-3'-phosphate
  modified_base 17: mod_base = OTHER; note = 2'-O-methyladenosine-3'-phosphate
  modified_base 18: mod_base = OTHER; note = 2'-O-methyladenosine-3'-phosphate
  modified_base 19: mod_base = OTHER; note = 2'-O-methylguanosine-3'-phosphate
  modified_base 20: mod_base = OTHER; note = 2'-O-methylguanosine-3'-phosphate
  modified_base 21: mod_base = OTHER; note = 2'-O-methyladenosine-3'-phosphorothioate
  modified_base 22: mod_base = OTHER; note = 2'-O-methylcytidine-3'-phosphorothioate
  modified_base 23: mod_base = OTHER; note = 2'-O-methyluridine
aaagaaaaattgatgcaaggact

SEQ ID NO: 1465 - RNA, 23 nt, synthetic construct
  source 1..23: mol_type = other RNA
  modified_base 1: mod_base = OTHER; note = 2'-O-methyladenosine-3'-phosphorothioate
  modified_base 2: mod_base = OTHER; note = 2'-deoxy-2'-fluorocytidine-3'-phosphorothioate
  modified_base 3: mod_base = OTHER; note = 2'-O-methyladenosine-3'-phosphate
  modified_base 4: mod_base = OTHER; note = 2'-O-methylcytidine-3'-phosphate
  modified_base 5: mod_base = OTHER; note = 2'-O-methyluridine-3'-phosphate
  modified_base 6: mod_base = OTHER; note = 2'-deoxy-2'-fluorocytidine-3'-phosphate
  modified_base 7: mod_base = OTHER; note = 2'-O-methyladenosine-3'-phosphate
  modified_base 8: mod_base = OTHER; note = 2'-deoxy-2'-fluoroadenosine-3'-phosphate
  modified_base 9: mod_base = OTHER; note = 2'-deoxy-2'-fluoroadenosine-3'-phosphate
  modified_base 10: mod_base = OTHER; note = 2'-O-methylguanosine-3'-phosphate
  modified_base 11: mod_base = OTHER; note = 2'-O-methyladenosine-3'-phosphate
  modified_base 12: mod_base = OTHER; note = 2'-O-methyladenosine-3'-phosphate
  modified_base 13: mod_base = OTHER; note = 2'-O-methyladenosine-3'-phosphate
  modified_base 14: mod_base = OTHER; note = 2'-deoxy-2'-fluorouridine-3'-phosphate
  modified_base 15: mod_base = OTHER; note = 2'-O-methylguanosine-3'-phosphate
  modified_base 16: mod_base = OTHER; note = 2'-deoxy-2'-fluoroadenosine-3'-phosphate
  modified_base 17: mod_base = OTHER; note = 2'-O-methyladenosine-3'-phosphate
  modified_base 18: mod_base = OTHER; note = 2'-O-methyladenosine-3'-phosphate
  modified_base 19: mod_base = OTHER; note = 2'-O-methyluridine-3'-phosphate
  modified_base 20: mod_base = OTHER; note = 2'-O-methyladenosine-3'-phosphate
  modified_base 21: mod_base = OTHER; note = 2'-O-methyladenosine-3'-phosphorothioate
  modified_base 22: mod_base = OTHER; note = 2'-O-methylguanosine-3'-phosphorothioate
  modified_base 23: mod_base = OTHER; note = 2'-O-methyladenosine
acactcaaagaaatgaaataaga

SEQ ID NO: 1466 - RNA, 23 nt, synthetic construct
  source 1..23: mol_type = other RNA
  modified_base 1: mod_base = OTHER; note = 2'-O-methyladenosine-3'-phosphorothioate
  modified_base 2: mod_base = OTHER; note = 2'-deoxy-2'-fluoroadenosine-3'-phosphorothioate
  modified_base 3: mod_base = OTHER; note = 2'-O-methyluridine-3'-phosphate
  modified_base 4: mod_base = OTHER; note = 2'-O-methyluridine-3'-phosphate
  modified_base 5: mod_base = OTHER; note = 2'-O-methyladenosine-3'-phosphate
  modified_base 6: mod_base = OTHER; note = 2'-deoxy-2'-fluoroadenosine-3'-phosphate
  modified_base 7: mod_base = OTHER; note = 2'-O-methylguanosine-3'-phosphate
  modified_base 8: mod_base = OTHER; note = 2'-deoxy-2'-fluoroadenosine-3'-phosphate
  modified_base 9: mod_base = OTHER; note = 2'-deoxy-2'-fluorocytidine-3'-phosphate
  modified_base 10: mod_base = OTHER; note = 2'-O-methyladenosine-3'-phosphate
  modified_base 11: mod_base = OTHER; note = 2'-O-methylcytidine-3'-phosphate
  modified_base 12: mod_base = OTHER; note = 2'-O-methyluridine-3'-phosphate
  modified_base 13: mod_base = OTHER; note = 2'-O-methylcytidine-3'-phosphate
  modified_base 14: mod_base = OTHER; note = 2'-deoxy-2'-fluoroadenosine-3'-phosphate
  modified_base 15: mod_base = OTHER; note = 2'-O-methyladenosine-3'-phosphate
  modified_base 16: mod_base = OTHER; note = 2'-deoxy-2'-fluoroadenosine-3'-phosphate
  modified_base 17: mod_base = OTHER; note = 2'-O-methylguanosine-3'-phosphate
  modified_base 18: mod_base = OTHER; note = 2'-O-methyladenosine-3'-phosphate
  modified_base 19: mod_base = OTHER; note = 2'-O-methyladenosine-3'-phosphate
  modified_base 20: mod_base = OTHER; note = 2'-O-methyladenosine-3'-phosphate
  modified_base 21: mod_base = OTHER; note = 2'-O-methyluridine-3'-phosphorothioate
  modified_base 22: mod_base = OTHER; note = 2'-O-methylguanosine-3'-phosphorothioate
  modified_base 23: mod_base = OTHER; note = 2'-O-methyladenosine
aattaagacactcaaagaaatga

SEQ ID NO: 1467 - RNA, 23 nt, synthetic construct
  source 1..23: mol_type = other RNA
  modified_base 1: mod_base = OTHER; note = 2'-O-methyladenosine-3'-phosphorothioate
  modified_base 2: mod_base = OTHER; note = 2'-deoxy-2'-fluorocytidine-3'-phosphorothioate
  modified_base 3: mod_base = OTHER; note = 2'-O-methyluridine-3'-phosphate
  modified_base 4: mod_base = OTHER; note = 2'-O-methyluridine-3'-phosphate
  modified_base 5: mod_base = OTHER; note = 2'-O-methyluridine-3'-phosphate
  modified_base 6: mod_base = OTHER; note = 2'-deoxy-2'-fluorouridine-3'-phosphate
  modified_base 7: mod_base = OTHER; note = 2'-O-methyladenosine-3'-phosphate
  modified_base 8: mod_base = OTHER; note = 2'-deoxy-2'-fluoroadenosine-3'-phosphate
  modified_base 9: mod_base = OTHER; note = 2'-deoxy-2'-fluorouridine-3'-phosphate
  modified_base 10: mod_base = OTHER; note = 2'-O-methyluridine-3'-phosphate
  modified_base 11: mod_base = OTHER; note = 2'-O-methyladenosine-3'-phosphate
  modified_base 12: mod_base = OTHER; note = 2'-O-methyladenosine-3'-phosphate
  modified_base 13: mod_base = OTHER; note = 2'-O-methylguanosine-3'-phosphate
  modified_base 14: mod_base = OTHER; note = 2'-deoxy-2'-fluoroadenosine-3'-phosphate
  modified_base 15: mod_base = OTHER; note = 2'-O-methylcytidine-3'-phosphate
  modified_base 16: mod_base = OTHER; note = 2'-deoxy-2'-fluoroadenosine-3'-phosphate
  modified_base 17: mod_base = OTHER; note = 2'-O-methylcytidine-3'-phosphate
  modified_base 18: mod_base = OTHER; note = 2'-O-methyluridine-3'-phosphate
  modified_base 19: mod_base = OTHER; note = 2'-O-methylcytidine-3'-phosphate
  modified_base 20: mod_base = OTHER; note = 2'-O-methyladenosine-3'-phosphate
  modified_base 21: mod_base = OTHER; note = 2'-O-methyladenosine-3'-phosphorothioate
  modified_base 22: mod_base = OTHER; note = 2'-O-methyladenosine-3'-phosphorothioate
  modified_base 23: mod_base = OTHER; note = 2'-O-methylguanosine
acttttaattaagacactcaaag

SEQ ID NO: 1468 - RNA, 23 nt, synthetic construct
  source 1..23: mol_type = other RNA
  modified_base 1: mod_base = OTHER; note = 2'-O-methyladenosine-3'-phosphorothioate
  modified_base 2: mod_base = OTHER; note = 2'-deoxy-2'-fluorocytidine-3'-phosphorothioate
  modified_base 3: mod_base = OTHER; note = 2'-O-methylcytidine-3'-phosphate
  modified_base 4: mod_base = OTHER; note = 2'-O-methyladenosine-3'-phosphate
  modified_base 5: mod_base = OTHER; note = 2'-O-methyladenosine-3'-phosphate
  modified_base 6: mod_base = OTHER; note = 2'-deoxy-2'-fluoroguanosine-3'-phosphate
  modified_base 7: mod_base = OTHER; note = 2'-O-methylguanosine-3'-phosphate
  modified_base 8: mod_base = OTHER; note = 2'-deoxy-2'-fluoroadenosine-3'-phosphate
  modified_base 9: mod_base = OTHER; note = 2'-deoxy-2'-fluoroadenosine-3'-phosphate
  modified_base 10: mod_base = OTHER; note = 2'-O-methylguanosine-3'-phosphate
  modified_base 11: mod_base = OTHER; note = 2'-O-methyluridine-3'-phosphate
  modified_base 12: mod_base = OTHER; note = 2'-O-methyluridine-3'-phosphate
  modified_base 13: mod_base = OTHER; note = 2'-O-methyladenosine-3'-phosphate
  modified_base 14: mod_base = OTHER; note = 2'-deoxy-2'-fluoroadenosine-3'-phosphate
  modified_base 15: mod_base = OTHER; note = 2'-O-methyladenosine-3'-phosphate
  modified_base 16: mod_base = OTHER; note = 2'-deoxy-2'-fluoroadenosine-3'-phosphate
  modified_base 17: mod_base = OTHER; note = 2'-O-methyluridine-3'-phosphate
  modified_base 18: mod_base = OTHER; note = 2'-O-methyladenosine-3'-phosphate
  modified_base 19: mod_base = OTHER; note = 2'-O-methyluridine-3'-phosphate
  modified_base 20: mod_base = OTHER; note = 2'-O-methyluridine-3'-phosphate
  modified_base 21: mod_base = OTHER; note = 2'-O-methylcytidine-3'-phosphorothioate
  modified_base 22: mod_base = OTHER; note = 2'-O-methyluridine-3'-phosphorothioate
  modified_base 23: mod_base = OTHER; note = 2'-O-methyluridine
accaaggaagttaaaatattctt

SEQ ID NO: 1469 - RNA, 23 nt, synthetic construct
  source 1..23: mol_type = other RNA
  modified_base 1: mod_base = OTHER; note = 2'-O-methyladenosine-3'-phosphorothioate
  modified_base 2: mod_base = OTHER; note = 2'-deoxy-2'-fluoroadenosine-3'-phosphorothioate
  modified_base 3: mod_base = OTHER; note = 2'-O-methyluridine-3'-phosphate
  modified_base 4: mod_base = OTHER; note = 2'-O-methylguanosine-3'-phosphate
  modified_base 5: mod_base = OTHER; note = 2'-O-methyladenosine-3'-phosphate
  modified_base 6: mod_base = OTHER; note = 2'-deoxy-2'-fluoroguanosine-3'-phosphate
  modified_base 7: mod_base = OTHER; note = 2'-O-methyluridine-3'-phosphate
  modified_base 8: mod_base = OTHER; note = 2'-deoxy-2'-fluorocytidine-3'-phosphate
  modified_base 9: mod_base = OTHER; note = 2'-deoxy-2'-fluorocytidine-3'-phosphate
  modified_base 10: mod_base = OTHER; note = 2'-O-methyladenosine-3'-phosphate
  modified_base 11: mod_base = OTHER; note = 2'-O-methyladenosine-3'-phosphate
  modified_base 12: mod_base = OTHER; note = 2'-O-methylguanosine-3'-phosphate
  modified_base 13: mod_base = OTHER; note = 2'-O-methylguanosine-3'-phosphate
  modified_base 14: mod_base = OTHER; note = 2'-deoxy-2'-fluoroadenosine-3'-phosphate
  modified_base 15: mod_base = OTHER; note = 2'-O-methyladenosine-3'-phosphate
  modified_base 16: mod_base = OTHER; note = 2'-deoxy-2'-fluoroguanosine-3'-phosphate
  modified_base 17: mod_base = OTHER; note = 2'-O-methyluridine-3'-phosphate
  modified_base 18: mod_base = OTHER; note = 2'-O-methyluridine-3'-phosphate
  modified_base 19: mod_base = OTHER; note = 2'-O-methyladenosine-3'-phosphate
  modified_base 20: mod_base = OTHER; note = 2'-O-methyladenosine-3'-phosphate
  modified_base 21: mod_base = OTHER; note = 2'-O-methyladenosine-3'-phosphorothioate
  modified_base 22: mod_base = OTHER; note = 2'-O-methyladenosine-3'-phosphorothioate
  modified_base 23: mod_base = OTHER; note = 2'-O-methyluridine
aatgagtccaaggaagttaaaat

SEQ ID NO: 1470 - RNA, 23 nt, synthetic construct
  source 1..23: mol_type = other RNA
  modified_base 1: mod_base = OTHER; note = 2'-O-methyladenosine-3'-phosphorothioate
  modified_base 2: mod_base = OTHER; note = 2'-deoxy-2'-fluorouridine-3'-phosphorothioate
  modified_base 3: mod_base = OTHER; note = 2'-O-methyluridine-3'-phosphate
  modified_base 4: mod_base = OTHER; note = 2'-O-methyluridine-3'-phosphate
  modified_base 5: mod_base = OTHER; note = 2'-O-methyladenosine-3'-phosphate
  modified_base 6: mod_base = OTHER; note = 2'-deoxy-2'-fluoroadenosine-3'-phosphate
  modified_base 7: mod_base = OTHER; note = 2'-O-methyladenosine-3'-phosphate
  modified_base 8: mod_base = OTHER; note = 2'-deoxy-2'-fluoroadenosine-3'-phosphate
  modified_base 9: mod_base = OTHER; note = 2'-deoxy-2'-fluorouridine-3'-phosphate
  modified_base 10: mod_base = OTHER; note = 2'-O-methylguanosine-3'-phosphate
  modified_base 11: mod_base = OTHER; note = 2'-O-methyladenosine-3'-phosphate
  modified_base 12: mod_base = OTHER; note = 2'-O-methylguanosine-3'-phosphate
  modified_base 13: mod_base = OTHER; note = 2'-O-methyluridine-3'-phosphate
  modified_base 14: mod_base = OTHER; note = 2'-deoxy-2'-fluorocytidine-3'-phosphate
  modified_base 15: mod_base = OTHER; note = 2'-O-methylcytidine-3'-phosphate
  modified_base 16: mod_base = OTHER; note = 2'-deoxy-2'-fluoroadenosine-3'-phosphate
  modified_base 17: mod_base = OTHER; note = 2'-O-methyladenosine-3'-phosphate
  modified_base 18: mod_base = OTHER; note = 2'-O-methylguanosine-3'-phosphate
  modified_base 19: mod_base = OTHER; note = 2'-O-methylguanosine-3'-phosphate
  modified_base 20: mod_base = OTHER; note = 2'-O-methyladenosine-3'-phosphate
  modified_base 21: mod_base = OTHER; note = 2'-O-methyladenosine-3'-phosphorothioate
  modified_base 22: mod_base = OTHER; note = 2'-O-methylguanosine-3'-phosphorothioate
  modified_base 23: mod_base = OTHER; note = 2'-O-methyluridine
atttaaaatgagtccaaggaagt

SEQ ID NO: 1471 - RNA, 23 nt, synthetic construct
  source 1..23: mol_type = other RNA
  modified_base 1: mod_base = OTHER; note = 2'-O-methyladenosine-3'-phosphorothioate
  modified_base 2: mod_base = OTHER; note = 2'-deoxy-2'-fluoroguanosine-3'-phosphorothioate
  modified_base 3: mod_base = OTHER; note = 2'-O-methyluridine-3'-phosphate
  modified_base 4: mod_base = OTHER; note = 2'-O-methyladenosine-3'-phosphate
  modified_base 5: mod_base = OTHER; note = 2'-O-methylguanosine-3'-phosphate
  modified_base 6: mod_base = OTHER; note = 2'-deoxy-2'-fluoroadenosine-3'-phosphate
  modified_base 7: mod_base = OTHER; note = 2'-O-methyladenosine-3'-phosphate
  modified_base 8: mod_base = OTHER; note = 2'-deoxy-2'-fluorouridine-3'-phosphate
  modified_base 9: mod_base = OTHER; note = 2'-deoxy-2'-fluoroguanosine-3'-phosphate
  modified_base 10: mod_base = OTHER; note = 2'-O-methylguanosine-3'-phosphate
  modified_base 11: mod_base = OTHER; note = 2'-O-methylguanosine-3'-phosphate
  modified_base 12: mod_base = OTHER; note = 2'-O-methyladenosine-3'-phosphate
  modified_base 13: mod_base = OTHER; note = 2'-O-methyladenosine-3'-phosphate
  modified_base 14: mod_base = OTHER; note = 2'-deoxy-2'-fluorouridine-3'-phosphate
  modified_base 15: mod_base = OTHER; note = 2'-O-methyladenosine-3'-phosphate
  modified_base 16: mod_base = OTHER; note = 2'-deoxy-2'-fluoroadenosine-3'-phosphate
  modified_base 17: mod_base = OTHER; note = 2'-O-methyluridine-3'-phosphate
  modified_base 18: mod_base = OTHER; note = 2'-O-methyladenosine-3'-phosphate
  modified_base 19: mod_base = OTHER; note = 2'-O-methyladenosine-3'-phosphate
  modified_base 20: mod_base = OTHER; note = 2'-O-methyluridine-3'-phosphate
  modified_base 21: mod_base = OTHER; note = 2'-O-methyladenosine-3'-phosphorothioate
  modified_base 22: mod_base = OTHER; note = 2'-O-methylcytidine-3'-phosphorothioate
  modified_base 23: mod_base = OTHER; note = 2'-O-methyladenosine
agtagaatgggaataataataca

SEQ ID NO: 1472 - RNA, 23 nt, synthetic construct
  source 1..23: mol_type = other RNA
  modified_base 1: mod_base = OTHER; note = 2'-O-methyladenosine-3'-phosphorothioate
  modified_base 2: mod_base = OTHER; note = 2'-deoxy-2'-fluoroadenosine-3'-phosphorothioate
  modified_base 3: mod_base = OTHER; note = 2'-O-methyluridine-3'-phosphate
  modified_base 4: mod_base = OTHER; note = 2'-O-methyladenosine-3'-phosphate
  modified_base 5: mod_base = OTHER; note = 2'-O-methylguanosine-3'-phosphate
  modified_base 6: mod_base = OTHER; note = 2'-deoxy-2'-fluorouridine-3'-phosphate
  modified_base 7: mod_base = OTHER; note = 2'-O-methyladenosine-3'-phosphate
  modified_base 8: mod_base = OTHER; note = 2'-deoxy-2'-fluorouridine-3'-phosphate
  modified_base 9: mod_base = OTHER; note = 2'-deoxy-2'-fluoroguanosine-3'-phosphate
  modified_base 10: mod_base = OTHER; note = 2'-O-methyluridine-3'-phosphate
  modified_base 11: mod_base = OTHER; note = 2'-O-methyladenosine-3'-phosphate
  modified_base 12: mod_base = OTHER; note = 2'-O-methylguanosine-3'-phosphate
  modified_base 13: mod_base = OTHER; note = 2'-O-methyladenosine-3'-phosphate
  modified_base 14: mod_base = OTHER; note = 2'-deoxy-2'-fluoroadenosine-3'-phosphate
  modified_base 15: mod_base = OTHER; note = 2'-O-methyluridine-3'-phosphate
  modified_base 16: mod_base = OTHER; note = 2'-deoxy-2'-fluoroguanosine-3'-phosphate
  modified_base 17: mod_base = OTHER; note = 2'-O-methylguanosine-3'-phosphate
  modified_base 18: mod_base = OTHER; note = 2'-O-methylguanosine-3'-phosphate
  modified_base 19: mod_base = OTHER; note = 2'-O-methyladenosine-3'-phosphate
  modified_base 20: mod_base = OTHER; note = 2'-O-methyladenosine-3'-phosphate
  modified_base 21: mod_base = OTHER; note = 2'-O-methyluridine-3'-phosphorothioate
  modified_base 22: mod_base = OTHER; note = 2'-O-methyladenosine-3'-phosphorothioate
  modified_base 23: mod_base = OTHER; note = 2'-O-methyladenosine
aatagtatgtagaatgggaataa

SEQ ID NO: 1473 - RNA, 23 nt, synthetic construct
  source 1..23: mol_type = other RNA
  modified_base 1: mod_base = OTHER; note = 2'-O-methyladenosine-3'-phosphorothioate
  modified_base 2: mod_base = OTHER; note = 2'-deoxy-2'-fluoroadenosine-3'-phosphorothioate
  modified_base 3: mod_base = OTHER; note = 2'-O-methylguanosine-3'-phosphate
  modified_base 4: mod_base = OTHER; note = 2'-O-methyladenosine-3'-phosphate
  modified_base 5: mod_base = OTHER; note = 2'-O-methyladenosine-3'-phosphate
  modified_base 6: mod_base = OTHER; note = 2'-deoxy-2'-fluoroadenosine-3'-phosphate
  modified_base 7: mod_base = OTHER; note = 2'-O-methyluridine-3'-phosphate
  modified_base 8: mod_base = OTHER; note = 2'-deoxy-2'-fluorouridine-3'-phosphate
  modified_base 9: mod_base = OTHER; note = 2'-deoxy-2'-fluorocytidine-3'-phosphate
  modified_base 10: mod_base = OTHER; note = 2'-O-methylcytidine-3'-phosphate
  modified_base 11: mod_base = OTHER; note = 2'-O-methyladenosine-3'-phosphate
  modified_base 12: mod_base = OTHER; note = 2'-O-methyluridine-3'-phosphate
  modified_base 13: mod_base = OTHER; note = 2'-O-methyladenosine-3'-phosphate
  modified_base 14: mod_base = OTHER; note = 2'-deoxy-2'-fluoroguanosine-3'-phosphate
  modified_base 15: mod_base = OTHER; note = 2'-O-methyluridine-3'-phosphate
  modified_base 16: mod_base = OTHER; note = 2'-deoxy-2'-fluoroadenosine-3'-phosphate
  modified_base 17: mod_base = OTHER; note = 2'-O-methyluridine-3'-phosphate
  modified_base 18: mod_base = OTHER; note = 2'-O-methylguanosine-3'-phosphate
  modified_base 19: mod_base = OTHER; note = 2'-O-methyluridine-3'-phosphate
  modified_base 20: mod_base = OTHER; note = 2'-O-methyladenosine-3'-phosphate
  modified_base 21: mod_base = OTHER; note = 2'-O-methylguanosine-3'-phosphorothioate
  modified_base 22: mod_base = OTHER; note = 2'-O-methyladenosine-3'-phosphorothioate
  modified_base 23: mod_base = OTHER; note = 2'-O-methyladenosine
aagaaattccatagtatgtagaa

SEQ ID NO: 1474 - RNA, 23 nt, synthetic construct
  source 1..23: mol_type = other RNA
  modified_base 1: mod_base = OTHER; note = 2'-O-methyladenosine-3'-phosphorothioate
  modified_base 2: mod_base = OTHER; note = 2'-deoxy-2'-fluoroadenosine-3'-phosphorothioate
  modified_base 3: mod_base = OTHER; note = 2'-O-methyladenosine-3'-phosphate
  modified_base 4: mod_base = OTHER; note = 2'-O-methyluridine-3'-phosphate
  modified_base 5: mod_base = OTHER; note = 2'-O-methylguanosine-3'-phosphate
  modified_base 6: mod_base = OTHER; note = 2'-deoxy-2'-fluoroadenosine-3'-phosphate
  modified_base 7: mod_base = OTHER; note = 2'-O-methylcytidine-3'-phosphate
  modified_base 8: mod_base = OTHER; note = 2'-deoxy-2'-fluorouridine-3'-phosphate
  modified_base 9: mod_base = OTHER; note = 2'-deoxy-2'-fluoroguanosine-3'-phosphate
  modified_base 10: mod_base = OTHER; note = 2'-O-methylguanosine-3'-phosphate
  modified_base 11: mod_base = OTHER; note = 2'-O-methylguanosine-3'-phosphate
  modified_base 12: mod_base = OTHER; note = 2'-O-methyladenosine-3'-phosphate
  modified_base 13: mod_base = OTHER; note = 2'-O-methylguanosine-3'-phosphate
  modified_base 14: mod_base = OTHER; note = 2'-deoxy-2'-fluoroadenosine-3'-phosphate
  modified_base 15: mod_base = OTHER; note = 2'-O-methyladenosine-3'-phosphate
  modified_base 16: mod_base = OTHER; note = 2'-deoxy-2'-fluoroadenosine-3'-phosphate
  modified_base 17: mod_base = OTHER; note = 2'-O-methyluridine-3'-phosphate
  modified_base 18: mod_base = OTHER; note = 2'-O-methyluridine-3'-phosphate
  modified_base 19: mod_base = OTHER; note = 2'-O-methylcytidine-3'-phosphate
  modified_base 20: mod_base = OTHER; note = 2'-O-methylcytidine-3'-phosphate
  modified_base 21: mod_base = OTHER; note = 2'-O-methyladenosine-3'-phosphorothioate
  modified_base 22: mod_base = OTHER; note = 2'-O-methyluridine-3'-phosphorothioate
  modified_base 23: mod_base = OTHER; note = 2'-O-methyladenosine
aaatgactgggagaaattccata

SEQ ID NO: 1475 - RNA, 23 nt, synthetic construct
  source 1..23: mol_type = other RNA
  modified_base 1: mod_base = OTHER; note = 2'-O-methyladenosine-3'-phosphorothioate
  modified_base 2: mod_base = OTHER; note = 2'-deoxy-2'-fluoroadenosine-3'-phosphorothioate
  modified_base 3: mod_base = OTHER; note = 2'-O-methylcytidine-3'-phosphate
  modified_base 4: mod_base = OTHER; note = 2'-O-methyladenosine-3'-phosphate
  modified_base 5: mod_base = OTHER; note = 2'-O-methyluridine-3'-phosphate
  modified_base 6: mod_base = OTHER; note = 2'-deoxy-2'-fluorouridine-3'-phosphate
  modified_base 7: mod_base = OTHER; note = 2'-O-methyluridine-3'-phosphate
  modified_base 8: mod_base = OTHER; note = 2'-deoxy-2'-fluoroadenosine-3'-phosphate
  modified_base 9: mod_base = OTHER; note = 2'-deoxy-2'-fluorouridine-3'-phosphate
  modified_base 10: mod_base = OTHER; note = 2'-O-methyluridine-3'-phosphate
  modified_base 11: mod_base = OTHER; note = 2'-O-methyladenosine-3'-phosphate
  modified_base 12: mod_base = OTHER; note = 2'-O-methyladenosine-3'-phosphate
  modified_base 13: mod_base = OTHER; note = 2'-O-methyladenosine-3'-phosphate
  modified_base 14: mod_base = OTHER; note = 2'-deoxy-2'-fluorouridine-3'-phosphate
  modified_base 15: mod_base = OTHER; note = 2'-O-methylguanosine-3'-phosphate
  modified_base 16: mod_base = OTHER; note = 2'-deoxy-2'-fluoroadenosine-3'-phosphate
  modified_base 17: mod_base = OTHER; note = 2'-O-methylcytidine-3'-phosphate
  modified_base 18: mod_base = OTHER; note = 2'-O-methyluridine-3'-phosphate
  modified_base 19: mod_base = OTHER; note = 2'-O-methylguanosine-3'-phosphate
  modified_base 20: mod_base = OTHER; note = 2'-O-methylguanosine-3'-phosphate
  modified_base 21: mod_base = OTHER; note = 2'-O-methylguanosine-3'-phosphorothioate
  modified_base 22: mod_base = OTHER; note = 2'-O-methyladenosine-3'-phosphorothioate
  modified_base 23: mod_base = OTHER; note = 2'-O-methylguanosine
aacatttattaaatgactgggag

SEQ ID NO: 1476 - RNA, 23 nt, synthetic construct
  source 1..23: mol_type = other RNA
  modified_base 1: mod_base = OTHER; note = 2'-O-methyladenosine-3'-phosphorothioate
  modified_base 2: mod_base = OTHER; note = 2'-deoxy-2'-fluoroguanosine-3'-phosphorothioate
  modified_base 3: mod_base = OTHER; note = 2'-O-methyladenosine-3'-phosphate
  modified_base 4: mod_base = OTHER; note = 2'-O-methyladenosine-3'-phosphate
  modified_base 5: mod_base = OTHER; note = 2'-O-methylguanosine-3'-phosphate
  modified_base 6: mod_base = OTHER; note = 2'-deoxy-2'-fluoroguanosine-3'-phosphate
  modified_base 7: mod_base = OTHER; note = 2'-O-methylcytidine-3'-phosphate
  modified_base 8: mod_base = OTHER; note = 2'-deoxy-2'-fluoroadenosine-3'-phosphate
  modified_base 9: mod_base = OTHER; note = 2'-deoxy-2'-fluorocytidine-3'-phosphate
  modified_base 10: mod_base = OTHER; note = 2'-O-methyladenosine-3'-phosphate
  modified_base 11: mod_base = OTHER; note = 2'-O-methyluridine-3'-phosphate
  modified_base 12: mod_base = OTHER; note = 2'-O-methyluridine-3'-phosphate
  modified_base 13: mod_base = OTHER; note = 2'-O-methyluridine-3'-phosphate
  modified_base 14: mod_base = OTHER; note = 2'-deoxy-2'-fluoroadenosine-3'-phosphate
  modified_base 15: mod_base = OTHER; note = 2'-O-methyluridine-3'-phosphate
  modified_base 16: mod_base = OTHER; note = 2'-deoxy-2'-fluorouridine-3'-phosphate
  modified_base 17: mod_base = OTHER; note = 2'-O-methyladenosine-3'-phosphate
  modified_base 18: mod_base = OTHER; note = 2'-O-methyladenosine-3'-phosphate
  modified_base 19: mod_base = OTHER; note = 2'-O-methyladenosine-3'-phosphate
  modified_base 20: mod_base = OTHER; note = 2'-O-methyluridine-3'-phosphate
  modified_base 21: mod_base = OTHER; note = 2'-O-methylguanosine-3'-phosphorothioate
  modified_base 22: mod_base = OTHER; note = 2'-O-methyladenosine-3'-phosphorothioate
  modified_base 23: mod_base = OTHER; note = 2'-O-methylcytidine
agaaggcacatttattaaatgac

SEQ ID NO: 1477 - RNA, 23 nt, synthetic construct
  source 1..23: mol_type = other RNA
  modified_base 7: mod_base = OTHER; note = 5'-methyluridine-3'-phosphate
  modified_base 11: mod_base = OTHER; note = 5'-methyluridine-3'-phosphate
  modified_base 14: mod_base = OTHER; note = 5'-methyluridine-3'-phosphate
  modified_base 16: mod_base = OTHER; note = 5'-methyluridine-3'-phosphate
  modified_base 17: mod_base = OTHER; note = 5'-methyluridine-3'-phosphate
  modified_base 18: mod_base = OTHER; note = 5'-methyluridine-3'-phosphate
  modified_base 22: mod_base = OTHER; note = 5'-methyluridine-3'-phosphate
cggcgctcactaatgtttaactc

SEQ ID NO: 1478 - RNA, 23 nt, synthetic construct
  source 1..23: mol_type = other RNA
  modified_base 4: mod_base = OTHER; note = 5'-methyluridine-3'-phosphate
  modified_base 5: mod_base = OTHER; note = 5'-methyluridine-3'-phosphate
  modified_base 18: mod_base = OTHER; note = 5'-methyluridine-3'-phosphate
  modified_base 22: mod_base = OTHER; note = 5'-methyluridine-3'-phosphate
aacttgccagcggcgagtgactc

SEQ ID NO: 1479 - RNA, 23 nt, synthetic construct
  source 1..23: mol_type = other RNA
  modified_base 3: mod_base = OTHER; note = 5'-methyluridine-3'-phosphate
  modified_base 4: mod_base = OTHER; note = 5'-methyluridine-3'-phosphate
  modified_base 6: mod_base = OTHER; note = 5'-methyluridine-3'-phosphate
  modified_base 10: mod_base = OTHER; note = 5'-methyluridine-3'-phosphate
  modified_base 15: mod_base = OTHER; note = 5'-methyluridine-3'-phosphate
  modified_base 18: mod_base = OTHER; note = 5'-methyluridine-3'-phosphate
  modified_base 19: mod_base = OTHER; note = 5'-methyluridine-3'-phosphate
  modified_base 21: mod_base = OTHER; note = 5'-methyluridine-3'-phosphate
  modified_base 23: mod_base = OTHER; note = 5'-methyluridine
acttctgcctgcgctccttctct

SEQ ID NO: 1480 - RNA, 23 nt, synthetic construct
  source 1..23: mol_type = other RNA
  modified_base 2: mod_base = OTHER; note = 5'-methyluridine-3'-phosphate
  modified_base 7: mod_base = OTHER; note = 5'-methyluridine-3'-phosphate
  modified_base 10: mod_base = OTHER; note = 5'-methyluridine-3'-phosphate
  modified_base 11: mod_base = OTHER; note = 5'-methyluridine-3'-phosphate
  modified_base 13: mod_base = OTHER; note = 5'-methyluridine-3'-phosphate
  modified_base 15: mod_base = OTHER; note = 5'-methyluridine-3'-phosphate
  modified_base 22: mod_base = OTHER; note = 5'-methyluridine-3'-phosphate
ctgcgctccttctctgaacgctc

SEQ ID NO: 1481 - RNA, 23 nt, synthetic construct
  source 1..23: mol_type = other RNA
  modified_base 1: mod_base = OTHER; note = 5'-methyluridine-3'-phosphate
  modified_base 4: mod_base = OTHER; note = 5'-methyluridine-3'-phosphate
  modified_base 5: mod_base = OTHER; note = 5'-methyluridine-3'-phosphate
  modified_base 7: mod_base = OTHER; note = 5'-methyluridine-3'-phosphate
  modified_base 9: mod_base = OTHER; note = 5'-methyluridine-3'-phosphate
  modified_base 16: mod_base = OTHER; note = 5'-methyluridine-3'-phosphate
  modified_base 20: mod_base = OTHER; note = 5'-methyluridine-3'-phosphate
  modified_base 21: mod_base = OTHER; note = 5'-methyluridine-3'-phosphate
tccttctctgaacgctcacttcc

SEQ ID NO: 1482 - RNA, 23 nt, synthetic construct
  source 1..23: mol_type = other RNA
  modified_base 7: mod_base = OTHER; note = 5'-methyluridine-3'-phosphate
  modified_base 11: mod_base = OTHER; note = 5'-methyluridine-3'-phosphate
  modified_base 12: mod_base = OTHER; note = 5'-methyluridine-3'-phosphate
gaacgctcacttccgaggagacg

SEQ ID NO: 1483 - RNA, 23 nt, synthetic construct
  source 1..23: mol_type = other RNA
  modified_base 2: mod_base = OTHER; note = 5'-methyluridine-3'-phosphate
  modified_base 3: mod_base = OTHER; note = 5'-methyluridine-3'-phosphate
  modified_base 22: mod_base = OTHER; note = 5'-methyluridine-3'-phosphate
cttccgaggagacgccgacgatg

SEQ ID NO: 1484 - RNA, 23 nt, synthetic construct
  source 1..23: mol_type = other RNA
  modified_base 11: mod_base = OTHER; note = 5'-methyluridine-3'-phosphate
  modified_base 22: mod_base = OTHER; note = 5'-methyluridine-3'-phosphate
acgccgacgatgaagacaccgtg

SEQ ID NO: 1485 - RNA, 23 nt, synthetic construct
  source 1..23: mol_type = other RNA
  modified_base 4: mod_base = OTHER; note = 5'-methyluridine-3'-phosphate
  modified_base 15: mod_base = OTHER; note = 5'-methyluridine-3'-phosphate
  modified_base 22: mod_base = OTHER; note = 5'-methyluridine-3'-phosphate
  modified_base 23: mod_base = OTHER; note = 5'-methyluridine
cgatgaagacaccgtggaaggtt

SEQ ID NO: 1486 - RNA, 23 nt, synthetic construct
  source 1..23: mol_type = other RNA
  modified_base 9: mod_base = OTHER; note = 5'-methyluridine-3'-phosphate
  modified_base 16: mod_base = OTHER; note = 5'-methyluridine-3'-phosphate
  modified_base 17: mod_base = OTHER; note = 5'-methyluridine-3'-phosphate
  modified_base 19: mod_base = OTHER; note = 5'-methyluridine-3'-phosphate
  modified_base 20: mod_base = OTHER; note = 5'-methyluridine-3'-phosphate
  modified_base 22: mod_base = OTHER; note = 5'-methyluridine-3'-phosphate
agacaccgtggaaggttcttctg

SEQ ID NO: 1487 - RNA, 23 nt, synthetic construct
  source 1..23: mol_type = other RNA
  modified_base 3: mod_base = OTHER; note = 5'-methyluridine-3'-phosphate
  modified_base 10: mod_base = OTHER; note = 5'-methyluridine-3'-phosphate
  modified_base 11: mod_base = OTHER; note = 5'-methyluridine-3'-phosphate
  modified_base 13: mod_base = OTHER; note = 5'-methyluridine-3'-phosphate
  modified_base 14: mod_base = OTHER; note = 5'-methyluridine-3'-phosphate
  modified_base 16: mod_base = OTHER; note = 5'-methyluridine-3'-phosphate
  modified_base 22: mod_base = OTHER; note = 5'-methyluridine-3'-phosphate
cgtggaaggttcttctgggactg

SEQ ID NO: 1488 - RNA, 23 nt, synthetic construct
  source 1..23: mol_type = other RNA
  modified_base 3: mod_base = OTHER; note = 5'-methyluridine-3'-phosphate
  modified_base 6: mod_base = OTHER; note = 5'-methyluridine-3'-phosphate
  modified_base 9: mod_base = OTHER; note = 5'-methyluridine-3'-phosphate
  modified_base 14: mod_base = OTHER; note = 5'-methyluridine-3'-phosphate
  modified_base 15: mod_base = OTHER; note = 5'-methyluridine-3'-phosphate
  modified_base 17: mod_base = OTHER; note = 5'-methyluridine-3'-phosphate
  modified_base 23: mod_base = OTHER; note = 5'-methyluridine
ggtgctgctgcgcttgtcaccat

SEQ ID NO: 1489 - RNA, 23 nt, synthetic construct
  source 1..23: mol_type = other RNA
  modified_base 3: mod_base = OTHER; note = 5'-methyluridine-3'-phosphate
  modified_base 8: mod_base = OTHER; note = 5'-methyluridine-3'-phosphate
  modified_base 9: mod_base = OTHER; note = 5'-methyluridine-3'-phosphate
  modified_base 11: mod_base = OTHER; note = 5'-methyluridine-3'-phosphate
  modified_base 17: mod_base = OTHER; note = 5'-methyluridine-3'-phosphate
  modified_base 20: mod_base = OTHER; note = 5'-methyluridine-3'-phosphate
gctgcgcttgtcaccatcatcac

SEQ ID NO: 1490 - RNA, 23 nt, synthetic construct
  source 1..23: mol_type = other RNA
  modified_base 5: mod_base = OTHER; note = 5'-methyluridine-3'-phosphate
  modified_base 11: mod_base = OTHER; note = 5'-methyluridine-3'-phosphate
  modified_base 14: mod_base = OTHER; note = 5'-methyluridine-3'-phosphate
  modified_base 15: mod_base = OTHER; note = 5'-methyluridine-3'-phosphate
  modified_base 17: mod_base = OTHER; note = 5'-methyluridine-3'-phosphate
  modified_base 20: mod_base = OTHER; note = 5'-methyluridine-3'-phosphate
accgtgcccgtggttctgctgaa

SEQ ID NO: 1491 - RNA, 23 nt, synthetic construct
  source 1..23: mol_type = other RNA
  modified_base 5: mod_base = OTHER; note = 5'-methyluridine-3'-phosphate
  modified_base 8: mod_base = OTHER; note = 5'-methyluridine-3'-phosphate
  modified_base 9: mod_base = OTHER; note = 5'-methyluridine-3'-phosphate
  modified_base 11: mod_base = OTHER; note = 5'-methyluridine-3'-phosphate
  modified_base 14: mod_base = OTHER; note = 5'-methyluridine-3'-phosphate
cccgtggttctgctgaacaaagg

SEQ ID NO: 1492 - RNA, 23 nt, synthetic construct
  source 1..23: mol_type = other RNA
  modified_base 1: mod_base = OTHER; note = 5'-methyluridine-3'-phosphate
  modified_base 3: mod_base = OTHER; note = 5'-methyluridine-3'-phosphate
  modified_base 6: mod_base = OTHER; note = 5'-methyluridine-3'-phosphate
  modified_base 22: mod_base = OTHER; note = 5'-methyluridine-3'-phosphate
tctgctgaacaaaggcacagatg

SEQ ID NO: 1493 - RNA, 23 nt, synthetic construct
  source 1..23: mol_type = other RNA
  modified_base 16: mod_base = OTHER; note = 5'-methyluridine-3'-phosphate
  modified_base 19: mod_base = OTHER; note = 5'-methyluridine-3'-phosphate
  modified_base 22: mod_base = OTHER; note = 5'-methyluridine-3'-phosphate
gaacaaaggcacagatgatgcta

SEQ ID NO: 1494 - RNA, 23 nt, synthetic construct
  source 1..23: mol_type = other RNA
  modified_base 10: mod_base = OTHER; note = 5'-methyluridine-3'-phosphate
  modified_base 13: mod_base = OTHER; note = 5'-methyluridine-3'-phosphate
  modified_base 16: mod_base = OTHER; note = 5'-methyluridine-3'-phosphate
  modified_base 22: mod_base = OTHER; note = 5'-methyluridine-3'-phosphate
aggcacagatgatgctacagctg

SEQ ID NO: 1495 - RNA, 23 nt, synthetic construct
  source 1..23: mol_type = other RNA
  modified_base 2: mod_base = OTHER; note = 5'-methyluridine-3'-phosphate
  modified_base 5: mod_base = OTHER; note = 5'-methyluridine-3'-phosphate
  modified_base 8: mod_base = OTHER; note = 5'-methyluridine-3'-phosphate
  modified_base 14: mod_base = OTHER; note = 5'-methyluridine-3'-phosphate
  modified_base 20: mod_base = OTHER; note = 5'-methyluridine-3'-phosphate
atgatgctacagctgacagtcgc

SEQ ID NO: 1496 - RNA, 23 nt, synthetic construct
  source 1..23: mol_type = other RNA
  modified_base 1: mod_base = OTHER; note = 5'-methyluridine-3'-phosphate
  modified_base 7: mod_base = OTHER; note = 5'-methyluridine-3'-phosphate
  modified_base 13: mod_base = OTHER; note = 5'-methyluridine-3'-phosphate
  modified_base 22: mod_base = OTHER; note = 5'-methyluridine-3'-phosphate
  modified_base 23: mod_base = OTHER; note = 5'-methyluridine
tacagctgacagtcgcaaaactt

SEQ ID NO: 1497 - RNA, 23 nt, synthetic construct
  source 1..23: mol_type = other RNA
  modified_base 1: mod_base = OTHER; note = 5'-methyluridine-3'-phosphate
  modified_base 7: mod_base = OTHER; note = 5'-methyluridine-3'-phosphate
  modified_base 16: mod_base = OTHER; note = 5'-methyluridine-3'-phosphate
  modified_base 17: mod_base = OTHER; note = 5'-methyluridine-3'-phosphate
  modified_base 22: mod_base = OTHER; note = 5'-methyluridine-3'-phosphate
tgacagtcgcaaaacttacactc

SEQ ID NO: 1498 - RNA, 23 nt, synthetic construct
  source 1..23: mol_type = other RNA
  modified_base 6: mod_base = OTHER; note = 5'-methyluridine-3'-phosphate
  modified_base 7: mod_base = OTHER; note = 5'-methyluridine-3'-phosphate
  modified_base 12: mod_base = OTHER; note = 5'-methyluridine-3'-phosphate
  modified_base 14: mod_base = OTHER; note = 5'-methyluridine-3'-phosphate
  modified_base 18: mod_base = OTHER; note = 5'-methyluridine-3'-phosphate
  modified_base 21: mod_base = OTHER; note = 5'-methyluridine-3'-phosphate
  modified_base 22: mod_base = OTHER; note = 5'-methyluridine-3'-phosphate
aaaacttacactctaactgatta

SEQ ID NO: 1499 - RNA, 23 nt, synthetic construct
  source 1..23: mol_type = other RNA
  modified_base 1: mod_base = OTHER; note = 5'-methyluridine-3'-phosphate
  modified_base 6: mod_base = OTHER; note = 5'-methyluridine-3'-phosphate
  modified_base 8: mod_base = OTHER; note = 5'-methyluridine-3'-phosphate
  modified_base 12: mod_base = OTHER; note = 5'-methyluridine-3'-phosphate
  modified_base 15: mod_base = OTHER; note = 5'-methyluridine-3'-phosphate
  modified_base 16: mod_base = OTHER; note = 5'-methyluridine-3'-phosphate
  modified_base 19: mod_base = OTHER; note = 5'-methyluridine-3'-phosphate
  modified_base 20: mod_base = OTHER; note = 5'-methyluridine-3'-phosphate
tacactctaactgattacttaaa

SEQ ID NO: 1500 - RNA, 23 nt, synthetic construct
  source 1..23: mol_type = other RNA
  modified_base 3: mod_base = OTHER; note = 5'-methyluridine-3'-phosphate
  modified_base 4: mod_base = OTHER; note = 5'-methyluridine-3'-phosphate
  modified_base 6: mod_base = OTHER; note = 5'-methyluridine-3'-phosphate
  modified_base 11: mod_base = OTHER; note = 5'-methyluridine-3'-phosphate
  modified_base 16: mod_base = OTHER; note = 5'-methyluridine-3'-phosphate
  modified_base 17: mod_base = OTHER; note = 5'-methyluridine-3'-phosphate
  modified_base 19: mod_base = OTHER; note = 5'-methyluridine-3'-phosphate
  modified_base 22: mod_base = OTHER; note = 5'-methyluridine-3'-phosphate
acttatagactgaagttatactc

SEQ ID NO: 1501 - RNA, 23 nt, synthetic construct
  source 1..23: mol_type = other RNA
  modified_base 2: mod_base = OTHER; note = 5'-methyluridine-3'-phosphate
  modified_base 7: mod_base = OTHER; note = 5'-methyluridine-3'-phosphate
  modified_base 8: mod_base = OTHER; note = 5'-methyluridine-3'-phosphate
  modified_base 10: mod_base = OTHER; note = 5'-methyluridine-3'-phosphate
  modified_base 13: mod_base = OTHER; note = 5'-methyluridine-3'-phosphate
  modified_base 16: mod_base = OTHER; note = 5'-methyluridine-3'-phosphate
  modified_base 17: mod_base = OTHER; note = 5'-methyluridine-3'-phosphate
  modified_base 22: mod_base = OTHER; note = 5'-methyluridine-3'-phosphate
ctgaagttatactccttaagatg

SEQ ID NO: 1502 - RNA, 23 nt, synthetic construct
  source 1..23: mol_type = other RNA
  modified_base 1: mod_base = OTHER; note = 5'-methyluridine-3'-phosphate
  modified_base 4: mod_base = OTHER; note = 5'-methyluridine-3'-phosphate
  modified_base 7: mod_base = OTHER; note = 5'-methyluridine-3'-phosphate
  modified_base 8: mod_base = OTHER; note = 5'-methyluridine-3'-phosphate
  modified_base 13: mod_base = OTHER; note = 5'-methyluridine-3'-phosphate
  modified_base 17: mod_base = OTHER; note = 5'-methyluridine-3'-phosphate
  modified_base 18: mod_base = OTHER; note = 5'-methyluridine-3'-phosphate
  modified_base 19: mod_base = OTHER; note = 5'-methyluridine-3'-phosphate
tactccttaagatggatttcaga

SEQ ID NO: 1503 - RNA, 23 nt, synthetic construct
  source 1..23: mol_type = other RNA
  modified_base 1: mod_base = OTHER; note = 5'-methyluridine-3'-phosphate
  modified_base 6: mod_base = OTHER; note = 5'-methyluridine-3'-phosphate
  modified_base 10: mod_base = OTHER; note = 5'-methyluridine-3'-phosphate
  modified_base 11: mod_base = OTHER; note = 5'-methyluridine-3'-phosphate
  modified_base 12: mod_base = OTHER; note = 5'-methyluridine-3'-phosphate
  modified_base 17: mod_base = OTHER; note = 5'-methyluridine-3'-phosphate
  modified_base 20: mod_base = OTHER; note = 5'-methyluridine-3'-phosphate
taagatggatttcagatcatgaa

SEQ ID NO: 1504 - RNA, 23 nt, synthetic construct
  source 1..23: mol_type = other RNA
  modified_base 4: mod_base = OTHER; note = 5'-methyluridine-3'-phosphate
  modified_base 5: mod_base = OTHER; note = 5'-methyluridine-3'-phosphate
  modified_base 6: mod_base = OTHER; note = 5'-methyluridine-3'-phosphate
  modified_base 11: mod_base = OTHER; note = 5'-methyluridine-3'-phosphate
  modified_base 14: mod_base = OTHER; note = 5'-methyluridine-3'-phosphate
  modified_base 18: mod_base = OTHER; note = 5'-methyluridine-3'-phosphate
  modified_base 20: mod_base = OTHER; note = 5'-methyluridine-3'-phosphate
  modified_base 22: mod_base = OTHER; note = 5'-methyluridine-3'-phosphate
ggatttcagatcatgaatatctc

SEQ ID NO: 1505 - RNA, 23 nt, synthetic construct
  source 1..23: mol_type = other RNA
  modified_base 4: mod_base = OTHER; note = 5'-methyluridine-3'-phosphate
  modified_base 7: mod_base = OTHER; note = 5'-methyluridine-3'-phosphate
  modified_base 11: mod_base = OTHER; note = 5'-methyluridine-3'-phosphate
  modified_base 13: mod_base = OTHER; note = 5'-methyluridine-3'-phosphate
  modified_base 15: mod_base = OTHER; note = 5'-methyluridine-3'-phosphate
  modified_base 17: mod_base = OTHER; note = 5'-methyluridine-3'-phosphate
agatcatgaatatctctacaaac

SEQ ID NO: 1506 - RNA, 23 nt, synthetic construct
  source 1..23: mol_type = other RNA
  modified_base 4: mod_base = OTHER; note = 5'-methyluridine-3'-phosphate
  modified_base 6: mod_base = OTHER; note = 5'-methyluridine-3'-phosphate
  modified_base 8: mod_base = OTHER; note = 5'-methyluridine-3'-phosphate
  modified_base 10: mod_base = OTHER; note = 5'-methyluridine-3'-phosphate
gaatatctctacaaacaagaaaa

SEQ ID NO: 1507 - RNA, 23 nt, synthetic construct
  source 1..23: mol_type = other RNA
  modified_base 2: mod_base = OTHER; note = 5'-methyluridine-3'-phosphate
  modified_base 4: mod_base = OTHER; note = 5'-methyluridine-3'-phosphate
  modified_base 6: mod_base = OTHER; note = 5'-methyluridine-3'-phosphate
  modified_base 7: mod_base = OTHER; note = 5'-methyluridine-3'-phosphate
  modified_base 10: mod_base = OTHER; note = 5'-methyluridine-3'-phosphate
  modified_base 12: mod_base = OTHER; note = 5'-methyluridine-3'-phosphate
  modified_base 13: mod_base = OTHER; note = 5'-methyluridine-3'-phosphate
  modified_base 17: mod_base = OTHER; note = 5'-methyluridine-3'-phosphate
  modified_base 20: mod_base = OTHER; note = 5'-methyluridine-3'-phosphate
atatcttggtattcaatgctgaa

SEQ ID NO: 1508 - RNA, 23 nt, synthetic construct
  source 1..23: mol_type = other RNA
  modified_base 1: mod_base = OTHER; note = 5'-methyluridine-3'-phosphate
  modified_base 4: mod_base = OTHER; note = 5'-methyluridine-3'-phosphate
  modified_base 6: mod_base = OTHER; note = 5'-methyluridine-3'-phosphate
  modified_base 7: mod_base = OTHER; note = 5'-methyluridine-3'-phosphate
  modified_base 11: mod_base = OTHER; note = 5'-methyluridine-3'-phosphate
  modified_base 14: mod_base = OTHER; note = 5'-methyluridine-3'-phosphate
  modified_base 18: mod_base = OTHER; note = 5'-methyluridine-3'-phosphate
  modified_base 20: mod_base = OTHER; note = 5'-methyluridine-3'-phosphate
tggtattcaatgctgaatatgga

SEQ ID NO: 1509 - RNA, 23 nt, synthetic construct
  source 1..23: mol_type = other RNA
  modified_base 1: mod_base = OTHER; note = 5'-methyluridine-3'-phosphate
  modified_base 5: mod_base = OTHER; note = 5'-methyluridine-3'-phosphate
  modified_base 8: mod_base = OTHER; note = 5'-methyluridine-3'-phosphate
  modified_base 12: mod_base = OTHER; note = 5'-methyluridine-3'-phosphate
  modified_base 14: mod_base = OTHER; note = 5'-methyluridine-3'-phosphate
tcaatgctgaatatggaaacagc

SEQ ID NO: 1510 - RNA, 23 nt, synthetic construct
  source 1..23: mol_type = other RNA
  modified_base 1: mod_base = OTHER; note = 5'-methyluridine-3'-phosphate
  modified_base 5: mod_base = OTHER; note = 5'-methyluridine-3'-phosphate
  modified_base 7: mod_base = OTHER; note = 5'-methyluridine-3'-phosphate
  modified_base 17: mod_base = OTHER; note = 5'-methyluridine-3'-phosphate
  modified_base 21: mod_base = OTHER; note = 5'-methyluridine-3'-phosphate
  modified_base 22: mod_base = OTHER; note = 5'-methyluridine-3'-phosphate
  modified_base 23: mod_base = OTHER; note = 5'-methyluridine
tgaatatggaaacagctcagttt

SEQ ID NO: 1511 - RNA, 23 nt, synthetic construct
  source 1..23: mol_type = other RNA
  modified_base 1: mod_base = OTHER; note = 5'-methyluridine-3'-phosphate
  modified_base 11: mod_base = OTHER; note = 5'-methyluridine-3'-phosphate
  modified_base 15: mod_base = OTHER; note = 5'-methyluridine-3'-phosphate
  modified_base 16: mod_base = OTHER; note = 5'-methyluridine-3'-phosphate
  modified_base 17: mod_base = OTHER; note = 5'-methyluridine-3'-phosphate
  modified_base 18: mod_base = OTHER; note = 5'-methyluridine-3'-phosphate
  modified_base 20: mod_base = OTHER; note = 5'-methyluridine-3'-phosphate
  modified_base 21: mod_base = OTHER; note = 5'-methyluridine-3'-phosphate
tggaaacagctcagttttcttgg

SEQ ID NO: 1512 - RNA, 23 nt, synthetic construct
  source 1..23: mol_type = other RNA
  modified_base 1: mod_base = OTHER; note = 5'-methyluridine-3'-phosphate
  modified_base 5: mod_base = OTHER; note = 5'-methyluridine-3'-phosphate
  modified_base 6: mod_base = OTHER; note = 5'-methyluridine-3'-phosphate
  modified_base 7: mod_base = OTHER; note = 5'-methyluridine-3'-phosphate
  modified_base 8: mod_base = OTHER; note = 5'-methyluridine-3'-phosphate
  modified_base 10: mod_base = OTHER; note = 5'-methyluridine-3'-phosphate
  modified_base 11: mod_base = OTHER; note = 5'-methyluridine-3'-phosphate
  modified_base 21: mod_base = OTHER; note = 5'-methyluridine-3'-phosphate
tcagttttcttggagaacagtac

SEQ ID NO: 1513 - RNA, 23 nt, synthetic construct
  source 1..23: mol_type = other RNA
  modified_base 1: mod_base = OTHER; note = 5'-methyluridine-3'-phosphate
  modified_base 2: mod_base = OTHER; note = 5'-methyluridine-3'-phosphate
  modified_base 12: mod_base = OTHER; note = 5'-methyluridine-3'-phosphate
  modified_base 16: mod_base = OTHER; note = 5'-methyluridine-3'-phosphate
  modified_base 17: mod_base = OTHER; note = 5'-methyluridine-3'-phosphate
  modified_base 18: mod_base = OTHER; note = 5'-methyluridine-3'-phosphate
  modified_base 21: mod_base = OTHER; note = 5'-methyluridine-3'-phosphate
ttggagaacagtacatttgatga

SEQ ID NO: 1514 - RNA, 23 nt, synthetic construct
  source 1..23: mol_type = other RNA
  modified_base 6: mod_base = OTHER; note = 5'-methyluridine-3'-phosphate
  modified_base 10: mod_base = OTHER; note = 5'-methyluridine-3'-phosphate
  modified_base 11: mod_base = OTHER; note = 5'-methyluridine-3'-phosphate
  modified_base 12: mod_base = OTHER; note = 5'-methyluridine-3'-phosphate
  modified_base 15: mod_base = OTHER; note = 5'-methyluridine-3'-phosphate
  modified_base 19: mod_base = OTHER; note = 5'-methyluridine-3'-phosphate
  modified_base 20: mod_base = OTHER; note = 5'-methyluridine-3'-phosphate
  modified_base 21: mod_base = OTHER; note = 5'-methyluridine-3'-phosphate
aacagtacatttgatgagtttgg

SEQ ID NO: 1515 - RNA, 23 nt, synthetic construct
  source 1..23: mol_type = other RNA
  modified_base 2: mod_base = OTHER; note = 5'-methyluridine-3'-phosphate
  modified_base 3: mod_base = OTHER; note = 5'-methyluridine-3'-phosphate
  modified_base 4: mod_base = OTHER; note = 5'-methyluridine-3'-phosphate
  modified_base 7: mod_base = OTHER; note = 5'-methyluridine-3'-phosphate
  modified_base 11: mod_base = OTHER; note = 5'-methyluridine-3'-phosphate
  modified_base 12: mod_base = OTHER; note = 5'-methyluridine-3'-phosphate
  modified_base 13: mod_base = OTHER; note = 5'-methyluridine-3'-phosphate
  modified_base 19: mod_base = OTHER; note = 5'-methyluridine-3'-phosphate
  modified_base 20: mod_base = OTHER; note = 5'-methyluridine-3'-phosphate
  modified_base 22: mod_base = OTHER; note = 5'-methyluridine-3'-phosphate
atttgatgagtttggacattcta

SEQ ID NO: 1516 - RNA, 23 nt, synthetic construct
  source 1..23: mol_type = other RNA
  modified_base 1: mod_base = OTHER; note = 5'-methyluridine-3'-phosphate
  modified_base 5: mod_base = OTHER; note = 5'-methyluridine-3'-phosphate
  modified_base 6: mod_base = OTHER; note = 5'-methyluridine-3'-phosphate
  modified_base 7: mod_base = OTHER; note = 5'-methyluridine-3'-phosphate
  modified_base 13: mod_base = OTHER; note = 5'-methyluridine-3'-phosphate
  modified_base 14: mod_base = OTHER; note = 5'-methyluridine-3'-phosphate
  modified_base 16: mod_base = OTHER; note = 5'-methyluridine-3'-phosphate
  modified_base 18: mod_base = OTHER; note = 5'-methyluridine-3'-phosphate
  modified_base 22: mod_base = OTHER; note = 5'-methyluridine-3'-phosphate
tgagtttggacattctatcaatg

SEQ ID NO: 1517 - RNA, 23 nt, synthetic construct
  source 1..23: mol_type = other RNA
  modified_base 1: mod_base = OTHER; note = 5'-methyluridine-3'-phosphate
  modified_base 7: mod_base = OTHER; note = 5'-methyluridine-3'-phosphate
  modified_base 8: mod_base = OTHER; note = 5'-methyluridine-3'-phosphate
  modified_base 10: mod_base = OTHER; note = 5'-methyluridine-3'-phosphate
  modified_base 12: mod_base = OTHER; note = 5'-methyluridine-3'-phosphate
  modified_base 16: mod_base = OTHER; note = 5'-methyluridine-3'-phosphate
  modified_base 19: mod_base = OTHER; note = 5'-methyluridine-3'-phosphate
  modified_base 20: mod_base = OTHER; note = 5'-methyluridine-3'-phosphate
  modified_base 22: mod_base = OTHER; note = 5'-methyluridine-3'-phosphate
  modified_base 23: mod_base = OTHER; note = 5'-methyluridine
tggacattctatcaatgattatt

SEQ ID NO: 1518 - RNA, 23 nt, synthetic construct
  source 1..23: mol_type = other RNA
  modified_base 4: mod_base = OTHER; note = 5'-methyluridine-3'-phosphate
  modified_base 7: mod_base = OTHER; note = 5'-methyluridine-3'-phosphate
  modified_base 8: mod_base = OTHER; note = 5'-methyluridine-3'-phosphate
  modified_base 10: mod_base = OTHER; note = 5'-methyluridine-3'-phosphate
  modified_base 11: mod_base = OTHER; note = 5'-methyluridine-3'-phosphate
  modified_base 15: mod_base = OTHER; note = 5'-methyluridine-3'-phosphate
  modified_base 17: mod_base = OTHER; note = 5'-methyluridine-3'-phosphate
  modified_base 19: mod_base = OTHER; note = 5'-methyluridine-3'-phosphate
  modified_base 22: mod_base = OTHER; note = 5'-methyluridine-3'-phosphate
caatgattattcaatatctcctg

SEQ ID NO: 1519 - RNA, 23 nt, synthetic construct
  source 1..23: mol_type = other RNA
  modified_base 2: mod_base = OTHER; note = 5'-methyluridine-3'-phosphate
  modified_base 5: mod_base = OTHER; note = 5'-methyluridine-3'-phosphate
  modified_base 8: mod_base = OTHER; note = 5'-methyluridine-3'-phosphate
  modified_base 15: mod_base = OTHER; note = 5'-methyluridine-3'-phosphate
  modified_base 16: mod_base = OTHER; note = 5'-methyluridine-3'-phosphate
  modified_base 17: mod_base = OTHER; note = 5'-methyluridine-3'-phosphate
  modified_base 19: mod_base = OTHER; note = 5'-methyluridine-3'-phosphate
  modified_base 20: mod_base = OTHER; note = 5'-methyluridine-3'-phosphate
  modified_base 22: mod_base = OTHER; note = 5'-methyluridine-3'-phosphate
ctcctgatgggcagtttattctc

SEQ ID NO: 1520 - RNA, 23 nt, synthetic construct
  source 1..23: mol_type = other RNA
  modified_base 7: mod_base = OTHER; note = 5'-methyluridine-3'-phosphate
  modified_base 8: mod_base = OTHER; note = 5'-methyluridine-3'-phosphate
  modified_base 9: mod_base = OTHER; note = 5'-methyluridine-3'-phosphate
  modified_base 11: mod_base = OTHER; note = 5'-methyluridine-3'-phosphate
  modified_base 12: mod_base = OTHER; note = 5'-methyluridine-3'-phosphate
  modified_base 14: mod_base = OTHER; note = 5'-methyluridine-3'-phosphate
  modified_base 16: mod_base = OTHER; note = 5'-methyluridine-3'-phosphate
  modified_base 17: mod_base = OTHER; note = 5'-methyluridine-3'-phosphate
  modified_base 22: mod_base = OTHER; note = 5'-methyluridine-3'-phosphate
gggcagtttattctcttagaata

SEQ ID NO: 1521 - RNA, 23 nt, synthetic construct
  source 1..23: mol_type = other RNA
  modified_base 1: mod_base = OTHER; note = 5'-methyluridine-3'-phosphate
  modified_base 2: mod_base = OTHER; note = 5'-methyluridine-3'-phosphate
  modified_base 4: mod_base = OTHER; note = 5'-methyluridine-3'-phosphate
  modified_base 6: mod_base = OTHER; note = 5'-methyluridine-3'-phosphate
  modified_base 7: mod_base = OTHER; note = 5'-methyluridine-3'-phosphate
  modified_base 12: mod_base = OTHER; note = 5'-methyluridine-3'-phosphate
  modified_base 18: mod_base = OTHER; note = 5'-methyluridine-3'-phosphate
  modified_base 22: mod_base = OTHER; note = 5'-methyluridine-3'-phosphate
ttctcttagaatacaactacgtg

SEQ ID NO: 1522 - RNA, 23 nt, synthetic construct
  source 1..23: mol_type = other RNA
  modified_base 4: mod_base = OTHER; note = 5'-methyluridine-3'-phosphate
  modified_base 10: mod_base = OTHER; note = 5'-methyluridine-3'-phosphate
  modified_base 14: mod_base = OTHER; note = 5'-methyluridine-3'-phosphate
  modified_base 22: mod_base = OTHER; note = 5'-methyluridine-3'-phosphate
gaatacaactacgtgaagcaatg

SEQ ID NO: 1523 - RNA, 23 nt, synthetic construct
  source 1..23: mol_type = other RNA
  modified_base 1: mod_base = OTHER; note = 5'-methyluridine-3'-phosphate
  modified_base 5: mod_base = OTHER; note = 5'-methyluridine-3'-phosphate
  modified_base 13: mod_base = OTHER; note = 5'-methyluridine-3'-phosphate
  modified_base 21: mod_base = OTHER; note = 5'-methyluridine-3'-phosphate
  modified_base 22: mod_base = OTHER; note = 5'-methyluridine-3'-phosphate
tacgtgaagcaatggaggcattc

SEQ ID NO: 1524 - RNA, 23 nt, synthetic construct
  source 1..23: mol_type = other RNA
  modified_base 1: mod_base = OTHER; note = 5'-methyluridine-3'-phosphate
  modified_base 9: mod_base = OTHER; note = 5'-methyluridine-3'-phosphate
  modified_base 10: mod_base = OTHER; note = 5'-methyluridine-3'-phosphate
  modified_base 13: mod_base = OTHER; note = 5'-methyluridine-3'-phosphate
  modified_base 21: mod_base = OTHER; note = 5'-methyluridine-3'-phosphate
  modified_base 22: mod_base = OTHER; note = 5'-methyluridine-3'-phosphate
tggaggcattcctacacagcttc

SEQ ID NO: 1525 - RNA, 23 nt, synthetic construct
  source 1..23: mol_type = other RNA
  modified_base 3: mod_base = OTHER; note = 5'-methyluridine-3'-phosphate
  modified_base 4: mod_base = OTHER; note = 5'-methyluridine-3'-phosphate
  modified_base 7: mod_base = OTHER; note = 5'-methyluridine-3'-phosphate
  modified_base 15: mod_base = OTHER; note = 5'-methyluridine-3'-phosphate
  modified_base 16: mod_base = OTHER; note = 5'-methyluridine-3'-phosphate
  modified_base 19: mod_base = OTHER; note = 5'-methyluridine-3'-phosphate
  modified_base 21: mod_base = OTHER; note = 5'-methyluridine-3'-phosphate
cattcctacacagcttcatatga

SEQ ID NO: 1526 - RNA, 23 nt, synthetic construct
  source 1..23: mol_type = other RNA
  modified_base 1: mod_base = OTHER; note = 5'-methyluridine-3'-phosphate
  modified_base 9: mod_base = OTHER; note = 5'-methyluridine-3'-phosphate
  modified_base 10: mod_base = OTHER; note = 5'-methyluridine-3'-phosphate
  modified_base 13: mod_base = OTHER; note = 5'-methyluridine-3'-phosphate
  modified_base 15: mod_base = OTHER; note = 5'-methyluridine-3'-phosphate
  modified_base 20: mod_base = OTHER; note = 5'-methyluridine-3'-phosphate
  modified_base 21: mod_base = OTHER; note = 5'-methyluridine-3'-phosphate
  modified_base 22: mod_base = OTHER; note = 5'-methyluridine-3'-phosphate
tacacagcttcatatgacattta

SEQ ID NO: 1527 - RNA, 23 nt, synthetic construct
  source 1..23: mol_type = other RNA
  modified_base 3: mod_base = OTHER; note = 5'-methyluridine-3'-phosphate
  modified_base 4: mod_base = OTHER; note = 5'-methyluridine-3'-phosphate
  modified_base 7: mod_base = OTHER; note = 5'-methyluridine-3'-phosphate
  modified_base 9: mod_base = OTHER; note = 5'-methyluridine-3'-phosphate
  modified_base 14: mod_base = OTHER; note = 5'-methyluridine-3'-phosphate
  modified_base 15: mod_base = OTHER; note = 5'-methyluridine-3'-phosphate
  modified_base 16: mod_base = OTHER; note = 5'-methyluridine-3'-phosphate
  modified_base 18: mod_base = OTHER; note = 5'-methyluridine-3'-phosphate
  modified_base 21: mod_base = OTHER; note = 5'-methyluridine-3'-phosphate
  modified_base 22: mod_base = OTHER; note = 5'-methyluridine-3'-phosphate
  modified_base 23: mod_base = OTHER; note = 5'-methyluridine
gcttcatatgacatttatgattt

SEQ ID NO: 1528 - RNA, 23 nt, synthetic construct
  source 1..23: mol_type = other RNA
  modified_base 1: mod_base = OTHER; note = 5'-methyluridine-3'-phosphate
  modified_base 3: mod_base = OTHER; note = 5'-methyluridine-3'-phosphate
  modified_base 6: mod_base = OTHER; note = 5'-methyluridine-3'-phosphate
  modified_base 7: mod_base = OTHER; note = 5'-methyluridine-3'-phosphate
  modified_base 8: mod_base = OTHER; note = 5'-methyluridine-3'-phosphate
  modified_base 12: mod_base = OTHER; note = 5'-methyluridine-3'-phosphate
  modified_base 23: mod_base = OTHER; note = 5'-methyluridine
tatgatttaaataaaaggcagct

SEQ ID NO: 1529 - RNA, 23 nt, synthetic construct
  source 1..23: mol_type = other RNA
  modified_base 1: mod_base = OTHER; note = 5'-methyluridine-3'-phosphate
  modified_base 2: mod_base = OTHER; note = 5'-methyluridine-3'-phosphate
  modified_base 6: mod_base = OTHER; note = 5'-methyluridine-3'-phosphate
  modified_base 17: mod_base = OTHER; note = 5'-methyluridine-3'-phosphate
  modified_base 20: mod_base = OTHER; note = 5'-methyluridine-3'-phosphate
  modified_base 21: mod_base = OTHER; note = 5'-methyluridine-3'-phosphate
ttaaataaaaggcagctgattac

SEQ ID NO: 1530 - RNA, 23 nt, synthetic construct
  source 1..23: mol_type = other RNA
  modified_base 10: mod_base = OTHER; note = 5'-methyluridine-3'-phosphate
  modified_base 13: mod_base = OTHER; note = 5'-methyluridine-3'-phosphate
  modified_base 14: mod_base = OTHER; note = 5'-methyluridine-3'-phosphate
aaaggcagctgattacagaagag

SEQ ID NO: 1531 - RNA, 23 nt, synthetic construct
  source 1..23: mol_type = other RNA
  modified_base 3: mod_base = OTHER; note = 5'-methyluridine-3'-phosphate
  modified_base 6: mod_base = OTHER; note = 5'-methyluridine-3'-phosphate
  modified_base 7: mod_base = OTHER; note = 5'-methyluridine-3'-phosphate
  modified_base 21: mod_base = OTHER; note = 5'-methyluridine-3'-phosphate
  modified_base 22: mod_base = OTHER; note = 5'-methyluridine-3'-phosphate
gctgattacagaagagaggattc

SEQ ID NO: 1532 - RNA, 23 nt, synthetic construct
  source 1..23: mol_type = other RNA
  modified_base 12: mod_base = OTHER; note = 5'-methyluridine-3'-phosphate
  modified_base 13: mod_base = OTHER; note = 5'-methyluridine-3'-phosphate
agaagagaggattccaaacaaca

SEQ ID NO: 1533 - RNA, 23 nt, synthetic construct
  source 1..23: mol_type = other RNA
  modified_base 5: mod_base = OTHER; note = 5'-methyluridine-3'-phosphate
  modified_base 6: mod_base = OTHER; note = 5'-methyluridine-3'-phosphate
  modified_base 22: mod_base = OTHER; note = 5'-methyluridine-3'-phosphate
aggattccaaacaacacacagtg

SEQ ID NO: 1534 - RNA, 23 nt, synthetic construct
  source 1..23: mol_type = other RNA
  modified_base 13: mod_base = OTHER; note = 5'-methyluridine-3'-phosphate
  modified_base 17: mod_base = OTHER; note = 5'-methyluridine-3'-phosphate
  modified_base 22: mod_base = OTHER; note = 5'-methyluridine-3'-phosphate
aacaacacacagtgggtcacatg

SEQ ID NO: 1535 - RNA, 23 nt, synthetic construct
  source 1..23: mol_type = other RNA
  modified_base 3: mod_base = OTHER; note = 5'-methyluridine-3'-phosphate
  modified_base 7: mod_base = OTHER; note = 5'-methyluridine-3'-phosphate
  modified_base 12: mod_base = OTHER; note = 5'-methyluridine-3'-phosphate
  modified_base 15: mod_base = OTHER; note = 5'-methyluridine-3'-phosphate
  modified_base 22: mod_base = OTHER; note = 5'-methyluridine-3'-phosphate
agtgggtcacatggtcaccagtg

SEQ ID NO: 1536 - RNA, 23 nt, synthetic construct
  source 1..23: mol_type = other RNA
  modified_base 4: mod_base = OTHER; note = 5'-methyluridine-3'-phosphate
  modified_base 7: mod_base = OTHER; note = 5'-methyluridine-3'-phosphate
  modified_base 14: mod_base = OTHER; note = 5'-methyluridine-3'-phosphate
  modified_base 18: mod_base = OTHER; note = 5'-methyluridine-3'-phosphate
  modified_base 21: mod_base = OTHER; note = 5'-methyluridine-3'-phosphate
acatggtcaccagtgggtcataa

SEQ ID NO: 1537 - RNA, 23 nt, synthetic construct
  source 1..23: mol_type = other RNA
  modified_base 5: mod_base = OTHER; note = 5'-methyluridine-3'-phosphate
  modified_base 9: mod_base = OTHER; note = 5'-methyluridine-3'-phosphate
  modified_base 12: mod_base = OTHER; note = 5'-methyluridine-3'-phosphate
  modified_base 16: mod_base = OTHER; note = 5'-methyluridine-3'-phosphate
  modified_base 17: mod_base = OTHER; note = 5'-methyluridine-3'-phosphate
  modified_base 22: mod_base = OTHER; note = 5'-methyluridine-3'-phosphate
ccagtgggtcataaattggcata

SEQ ID NO: 1538 - RNA, 23 nt, synthetic construct
  source 1..23: mol_type = other RNA
  modified_base 2: mod_base = OTHER; note = 5'-methyluridine-3'-phosphate
  modified_base 5: mod_base = OTHER; note = 5'-methyluridine-3'-phosphate
  modified_base 9: mod_base = OTHER; note = 5'-methyluridine-3'-phosphate
  modified_base 10: mod_base = OTHER; note = 5'-methyluridine-3'-phosphate
  modified_base 15: mod_base = OTHER; note = 5'-methyluridine-3'-phosphate
  modified_base 17: mod_base = OTHER; note = 5'-methyluridine-3'-phosphate
  modified_base 19: mod_base = OTHER; note = 5'-methyluridine-3'-phosphate
  modified_base 20: mod_base = OTHER; note = 5'-methyluridine-3'-phosphate
  modified_base 21: mod_base = OTHER; note = 5'-methyluridine-3'-phosphate
gtcataaattggcatatgtttgg

SEQ ID NO: 1539 - RNA, 23 nt, synthetic construct
  source 1..23: mol_type = other RNA
  modified_base 1: mod_base = OTHER; note = 5'-methyluridine-3'-phosphate
  modified_base 2: mod_base = OTHER; note = 5'-methyluridine-3'-phosphate
  modified_base 7: mod_base = OTHER; note = 5'-methyluridine-3'-phosphate
  modified_base 9: mod_base = OTHER; note = 5'-methyluridine-3'-phosphate
  modified_base 11: mod_base = OTHER; note = 5'-methyluridine-3'-phosphate
  modified_base 12: mod_base = OTHER; note = 5'-methyluridine-3'-phosphate
  modified_base 13: mod_base = OTHER; note = 5'-methyluridine-3'-phosphate
  modified_base 21: mod_base = OTHER; note = 5'-methyluridine-3'-phosphate
ttggcatatgtttggaacaatga

SEQ ID NO: 1540 - RNA, 23 nt, synthetic construct
  source 1..23: mol_type = other RNA
  modified_base 1: mod_base = OTHER; note = 5'-methyluridine-3'-phosphate
  modified_base 2: mod_base = OTHER; note = 5'-methyluridine-3'-phosphate
  modified_base 3: mod_base = OTHER; note = 5'-methyluridine-3'-phosphate
  modified_base 11: mod_base = OTHER; note = 5'-methyluridine-3'-phosphate
  modified_base 16: mod_base = OTHER; note = 5'-methyluridine-3'-phosphate
  modified_base 17: mod_base = OTHER; note = 5'-methyluridine-3'-phosphate
  modified_base 18: mod_base = OTHER; note = 5'-methyluridine-3'-phosphate
  modified_base 20: mod_base = OTHER; note = 5'-methyluridine-3'-phosphate
  modified_base 22: mod_base = OTHER; note = 5'-methyluridine-3'-phosphate
  modified_base 23: mod_base = OTHER; note = 5'-methyluridine
tttggaacaatgacatttatgtt

SEQ ID NO: 1541 - RNA, 23 nt, synthetic construct
  source 1..23: mol_type = other RNA
  modified_base 3: mod_base = OTHER; note = 5'-methyluridine-3'-phosphate
  modified_base 4: mod_base = OTHER; note = 5'-methyluridine-3'-phosphate
  modified_base 13: mod_base = OTHER; note = 5'-methyluridine-3'-phosphate
  modified_base 14: mod_base = OTHER; note = 5'-methyluridine-3'-phosphate
  modified_base 15: mod_base = OTHER; note = 5'-methyluridine-3'-phosphate
  modified_base 22: mod_base = OTHER; note = 5'-methyluridine-3'-phosphate
  modified_base 23: mod_base = OTHER; note = 5'-methyluridine
aattgaaccaaatttaccaagtt

SEQ ID NO: 1542 - RNA, 23 nt, synthetic construct
  source 1..23: mol_type = other RNA
  modified_base 7: mod_base = OTHER; note = 5'-methyluridine-3'-phosphate
  modified_base 8: mod_base = OTHER; note = 5'-methyluridine-3'-phosphate
  modified_base 9: mod_base = OTHER; note = 5'-methyluridine-3'-phosphate
  modified_base 16: mod_base = OTHER; note = 5'-methyluridine-3'-phosphate
  modified_base 17: mod_base = OTHER; note = 5'-methyluridine-3'-phosphate
accaaatttaccaagttacagaa

SEQ ID NO: 1543 - RNA, 23 nt, synthetic construct
  source 1..23: mol_type = other RNA
  modified_base 1: mod_base = OTHER; note = 5'-methyluridine-3'-phosphate
  modified_base 2: mod_base = OTHER; note = 5'-methyluridine-3'-phosphate
  modified_base 9: mod_base = OTHER; note = 5'-methyluridine-3'-phosphate
  modified_base 10: mod_base = OTHER; note = 5'-methyluridine-3'-phosphate
  modified_base 17: mod_base = OTHER; note = 5'-methyluridine-3'-phosphate
  modified_base 22: mod_base = OTHER; note = 5'-methyluridine-3'-phosphate
ttaccaagttacagaatcacatg

SEQ ID NO: 1544 - RNA, 23 nt, synthetic construct
  source 1..23: mol_type = other RNA
  modified_base 3: mod_base = OTHER; note = 5'-methyluridine-3'-phosphate
  modified_base 4: mod_base = OTHER; note = 5'-methyluridine-3'-phosphate
  modified_base 11: mod_base = OTHER; note = 5'-methyluridine-3'-phosphate
  modified_base 16: mod_base = OTHER; note = 5'-methyluridine-3'-phosphate
agttacagaatcacatggacggg

SEQ ID NO: 1545 - RNA, 23 nt, synthetic construct
  source 1..23: mol_type = other RNA
  modified_base 1: mod_base = OTHER; note = 5'-methyluridine-3'-phosphate
  modified_base 3: mod_base = OTHER; note = 5'-methyluridine-3'-phosphate
  modified_base 5: mod_base = OTHER; note = 5'-methyluridine-3'-phosphate
  modified_base 8: mod_base = OTHER; note = 5'-methyluridine-3'-phosphate
  modified_base 13: mod_base = OTHER; note = 5'-methyluridine-3'-phosphate
  modified_base 17: mod_base = OTHER; note = 5'-methyluridine-3'-phosphate
  modified_base 21: mod_base = OTHER; note = 5'-methyluridine-3'-phosphate
tatataatggaataactgactgg

SEQ ID NO: 1546 - RNA, 23 nt, synthetic construct
  source 1..23: mol_type = other RNA
  modified_base 1: mod_base = OTHER; note = 5'-methyluridine-3'-phosphate
  modified_base 6: mod_base = OTHER; note = 5'-methyluridine-3'-phosphate
  modified_base 10: mod_base = OTHER; note = 5'-methyluridine-3'-phosphate
  modified_base 14: mod_base = OTHER; note = 5'-methyluridine-3'-phosphate
  modified_base 18: mod_base = OTHER; note = 5'-methyluridine-3'-phosphate
  modified_base 19: mod_base = OTHER; note = 5'-methyluridine-3'-phosphate
  modified_base 20: mod_base = OTHER; note = 5'-methyluridine-3'-phosphate
  modified_base 22: mod_base = OTHER; note = 5'-methyluridine-3'-phosphate
tggaataactgactgggtttatg

SEQ ID NO: 1547 - RNA, 23 nt, synthetic construct
  source 1..23: mol_type = other RNA
  modified_base 2: mod_base = OTHER; note = 5'-methyluridine-3'-phosphate
  modified_base 6: mod_base = OTHER; note = 5'-methyluridine-3'-phosphate
  modified_base 10: mod_base = OTHER; note = 5'-methyluridine-3'-phosphate
  modified_base 11: mod_base = OTHER; note = 5'-methyluridine-3'-phosphate
  modified_base 12: mod_base = OTHER; note = 5'-methyluridine-3'-phosphate
  modified_base 14: mod_base = OTHER; note = 5'-methyluridine-3'-phosphate
ctgactgggtttatgaagaggaa

SEQ ID NO: 1548 - RNA, 23 nt, synthetic construct
  source 1..23: mol_type = other RNA
  modified_base 4: mod_base = OTHER; note = 5'-methyluridine-3'-phosphate
  modified_base 5: mod_base = OTHER; note = 5'-methyluridine-3'-phosphate
  modified_base 6: mod_base = OTHER; note = 5'-methyluridine-3'-phosphate
  modified_base 8: mod_base = OTHER; note = 5'-methyluridine-3'-phosphate
  modified_base 19: mod_base = OTHER; note = 5'-methyluridine-3'-phosphate
  modified_base 21: mod_base = OTHER; note = 5'-methyluridine-3'-phosphate
  modified_base 22: mod_base = OTHER; note = 5'-methyluridine-3'-phosphate
gggtttatgaagaggaagtcttc

SEQ ID NO: 1549 - RNA, 23 nt, synthetic construct
  source 1..23: mol_type = other RNA
  modified_base 2: mod_base = OTHER; note = 5'-methyluridine-3'-phosphate
  modified_base 13: mod_base = OTHER; note = 5'-methyluridine-3'-phosphate
  modified_base 15: mod_base = OTHER; note = 5'-methyluridine-3'-phosphate
  modified_base 16: mod_base = OTHER; note = 5'-methyluridine-3'-phosphate
  modified_base 20: mod_base = OTHER; note = 5'-methyluridine-3'-phosphate
atgaagaggaagtcttcagtgcc

SEQ ID NO: 1550 - RNA, 23 nt, synthetic construct
  source 1..23: mol_type = other RNA
  modified_base 6: mod_base = OTHER; note = 5'-methyluridine-3'-phosphate
  modified_base 8: mod_base = OTHER; note = 5'-methyluridine-3'-phosphate
  modified_base 9: mod_base = OTHER; note = 5'-methyluridine-3'-phosphate
  modified_base 13: mod_base = OTHER; note = 5'-methyluridine-3'-phosphate
  modified_base 17: mod_base = OTHER; note = 5'-methyluridine-3'-phosphate
  modified_base 20: mod_base = OTHER; note = 5'-methyluridine-3'-phosphate
  modified_base 22: mod_base = OTHER; note = 5'-methyluridine-3'-phosphate
ggaagtcttcagtgcctactctg

SEQ ID NO: 1551 - RNA, 23 nt, synthetic construct
  source 1..23: mol_type = other RNA
  modified_base 3: mod_base = OTHER; note = 5'-methyluridine-3'-phosphate
  modified_base 7: mod_base = OTHER; note = 5'-methyluridine-3'-phosphate
  modified_base 10: mod_base = OTHER; note = 5'-methyluridine-3'-phosphate
  modified_base 12: mod_base = OTHER; note = 5'-methyluridine-3'-phosphate
  modified_base 15: mod_base = OTHER; note = 5'-methyluridine-3'-phosphate
  modified_base 17: mod_base = OTHER; note = 5'-methyluridine-3'-phosphate
  modified_base 19: mod_base = OTHER; note = 5'-methyluridine-3'-phosphate
  modified_base 22: mod_base = OTHER; note = 5'-methyluridine-3'-phosphate
agtgcctactctgctctgtggtg

SEQ ID NO: 1552 - RNA, 23 nt, synthetic construct
  source 1..23: mol_type = other RNA
  modified_base 3: mod_base = OTHER; note = 5'-methyluridine-3'-phosphate
  modified_base 5: mod_base = OTHER; note = 5'-methyluridine-3'-phosphate
  modified_base 7: mod_base = OTHER; note = 5'-methyluridine-3'-phosphate
  modified_base 10: mod_base = OTHER; note = 5'-methyluridine-3'-phosphate
  modified_base 13: mod_base = OTHER; note = 5'-methyluridine-3'-phosphate
  modified_base 15: mod_base = OTHER; note = 5'-methyluridine-3'-phosphate
gctctgtggtggtctccaaacgg

SEQ ID NO: 1553 - RNA, 23 nt, synthetic construct
  source 1..23: mol_type = other RNA
  modified_base 2: mod_base = OTHER; note = 5'-methyluridine-3'-phosphate
  modified_base 5: mod_base = OTHER; note = 5'-methyluridine-3'-phosphate
  modified_base 7: mod_base = OTHER; note = 5'-methyluridine-3'-phosphate
  modified_base 19: mod_base = OTHER; note = 5'-methyluridine-3'-phosphate
  modified_base 20: mod_base = OTHER; note = 5'-methyluridine-3'-phosphate
  modified_base 21: mod_base = OTHER; note = 5'-methyluridine-3'-phosphate
  modified_base 22: mod_base = OTHER; note = 5'-methyluridine-3'-phosphate
  modified_base 23: mod_base = OTHER; note = 5'-methyluridine
gtggtctccaaacggcacttttt

SEQ ID NO: 1554 - RNA, 23 nt, synthetic construct
  source 1..23: mol_type = other RNA
  modified_base 1: mod_base = OTHER; note = 5'-methyluridine-3'-phosphate
  modified_base 2: mod_base = OTHER; note = 5'-methyluridine-3'-phosphate
  modified_base 3: mod_base = OTHER; note = 5'-methyluridine-3'-phosphate
  modified_base 8: mod_base = OTHER; note = 5'-methyluridine-3'-phosphate
  modified_base 10: mod_base = OTHER; note = 5'-methyluridine-3'-phosphate
  modified_base 17: mod_base = OTHER; note = 5'-methyluridine-3'-phosphate
  modified_base 18: mod_base = OTHER; note = 5'-methyluridine-3'-phosphate
  modified_base 19: mod_base = OTHER; note = 5'-methyluridine-3'-phosphate
tttagcatatgcccaatttaacg

SEQ ID NO: 1555 - RNA, 23 nt, synthetic construct
  source 1..23: mol_type = other RNA
  modified_base 1: mod_base = OTHER; note = 5'-methyluridine-3'-phosphate
  modified_base 3: mod_base = OTHER; note = 5'-methyluridine-3'-phosphate
  modified_base 10: mod_base = OTHER; note = 5'-methyluridine-3'-phosphate
  modified_base 11: mod_base = OTHER; note = 5'-methyluridine-3'-phosphate
  modified_base 12: mod_base = OTHER; note = 5'-methyluridine-3'-phosphate
tatgcccaatttaacgacacaga

SEQ ID NO: 1556 - RNA, 23 nt, synthetic construct
  source 1..23: mol_type = other RNA
  modified_base 3: mod_base = OTHER; note = 5'-methyluridine-3'-phosphate
  modified_base 4: mod_base = OTHER; note = 5'-methyluridine-3'-phosphate
  modified_base 5: mod_base = OTHER; note = 5'-methyluridine-3'-phosphate
  modified_base 19: mod_base = OTHER; note = 5'-methyluridine-3'-phosphate
aatttaacgacacagaagtccca

SEQ ID NO: 1557 - RNA, 23 nt, synthetic construct
  source 1..23: mol_type = other RNA
  modified_base 10: mod_base = OTHER; note = 5'-methyluridine-3'-phosphate
  modified_base 16: mod_base = OTHER; note = 5'-methyluridine-3'-phosphate
  modified_base 17: mod_base = OTHER; note = 5'-methyluridine-3'-phosphate
  modified_base 19: mod_base = OTHER; note = 5'-methyluridine-3'-phosphate
  modified_base 20: mod_base = OTHER; note = 5'-methyluridine-3'-phosphate
acacagaagtcccacttattgaa

SEQ ID NO: 1558 - RNA, 23 nt, synthetic construct
  source 1..23: mol_type = other RNA
  modified_base 4: mod_base = OTHER; note = 5'-methyluridine-3'-phosphate
  modified_base 10: mod_base = OTHER; note = 5'-methyluridine-3'-phosphate
  modified_base 11: mod_base = OTHER; note = 5'-methyluridine-3'-phosphate
  modified_base 13: mod_base = OTHER; note = 5'-methyluridine-3'-phosphate
  modified_base 14: mod_base = OTHER; note = 5'-methyluridine-3'-phosphate
  modified_base 18: mod_base = OTHER; note = 5'-methyluridine-3'-phosphate
  modified_base 21: mod_base = OTHER; note = 5'-methyluridine-3'-phosphate
aagtcccacttattgaatactcc

SEQ ID NO: 1559 - RNA, 23 nt, synthetic construct
  source 1..23: mol_type = other RNA
  modified_base 2: mod_base = OTHER; note = 5'-methyluridine-3'-phosphate
  modified_base 3: mod_base = OTHER; note = 5'-methyluridine-3'-phosphate
  modified_base 5: mod_base = OTHER; note = 5'-methyluridine-3'-phosphate
  modified_base 6: mod_base = OTHER; note = 5'-methyluridine-3'-phosphate
  modified_base 10: mod_base = OTHER; note = 5'-methyluridine-3'-phosphate
  modified_base 13: mod_base = OTHER; note = 5'-methyluridine-3'-phosphate
  modified_base 16: mod_base = OTHER; note = 5'-methyluridine-3'-phosphate
  modified_base 17: mod_base = OTHER; note = 5'-methyluridine-3'-phosphate
  modified_base 19: mod_base = OTHER; note = 5'-methyluridine-3'-phosphate
  modified_base 22: mod_base = OTHER; note = 5'-methyluridine-3'-phosphate
cttattgaatactccttctactc

SEQ ID NO: 1560 - RNA, 23 nt, synthetic construct
  source 1..23: mol_type = other RNA
  modified_base 1: mod_base = OTHER; note = 5'-methyluridine-3'-phosphate
  modified_base 4: mod_base = OTHER; note = 5'-methyluridine-3'-phosphate
  modified_base 7: mod_base = OTHER; note = 5'-methyluridine-3'-phosphate
  modified_base 8: mod_base = OTHER; note = 5'-methyluridine-3'-phosphate
  modified_base 10: mod_base = OTHER; note = 5'-methyluridine-3'-phosphate
  modified_base 13: mod_base = OTHER; note = 5'-methyluridine-3'-phosphate
  modified_base 15: mod_base = OTHER; note = 5'-methyluridine-3'-phosphate
  modified_base 18: mod_base = OTHER; note = 5'-methyluridine-3'-phosphate
  modified_base 22: mod_base = OTHER; note = 5'-methyluridine-3'-phosphate
tactccttctactctgatgagtc

SEQ ID NO: 1561 - RNA, 23 nt, synthetic construct
  source 1..23: mol_type = other RNA
  modified_base 2: mod_base = OTHER; note = 5'-methyluridine-3'-phosphate
  modified_base 4: mod_base = OTHER; note = 5'-methyluridine-3'-phosphate
  modified_base 7: mod_base = OTHER; note = 5'-methyluridine-3'-phosphate
  modified_base 11: mod_base = OTHER; note = 5'-methyluridine-3'-phosphate
  modified_base 15: mod_base = OTHER; note = 5'-methyluridine-3'-phosphate
  modified_base 20: mod_base = OTHER; note = 5'-methyluridine-3'-phosphate
ctctgatgagtcactgcagtacc

SEQ ID NO: 1562 - RNA, 23 nt, synthetic construct
  source 1..23: mol_type = other RNA
  modified_base 3: mod_base = OTHER; note = 5'-methyluridine-3'-phosphate
  modified_base 7: mod_base = OTHER; note = 5'-methyluridine-3'-phosphate
  modified_base 12: mod_base = OTHER; note = 5'-methyluridine-3'-phosphate
  modified_base 23: mod_base = OTHER; note = 5'-methyluridine
agtcactgcagtacccaaagact

SEQ ID NO: 1563 - RNA, 23 nt, synthetic construct
  source 1..23: mol_type = other RNA
  modified_base 5: mod_base = OTHER; note = 5'-methyluridine-3'-phosphate
  modified_base 16: mod_base = OTHER; note = 5'-methyluridine-3'-phosphate
  modified_base 18: mod_base = OTHER; note = 5'-methyluridine-3'-phosphate
gcagtacccaaagactgtacggg

SEQ ID NO: 1564 - RNA, 23 nt, synthetic construct
  source 1..23: mol_type = other RNA
  modified_base 7: mod_base = OTHER; note = 5'-methyluridine-3'-phosphate
  modified_base 9: mod_base = OTHER; note = 5'-methyluridine-3'-phosphate
  modified_base 15: mod_base = OTHER; note = 5'-methyluridine-3'-phosphate
  modified_base 16: mod_base = OTHER; note = 5'-methyluridine-3'-phosphate
  modified_base 20: mod_base = OTHER; note = 5'-methyluridine-3'-phosphate
  modified_base 22: mod_base = OTHER; note = 5'-methyluridine-3'-phosphate
aaagactgtacgggttccatatc

SEQ ID NO: 1565 - RNA, 23 nt, synthetic construct
  source 1..23: mol_type = other RNA
  modified_base 6: mod_base = OTHER; note = 5'-methyluridine-3'-phosphate
  modified_base 7: mod_base = OTHER; note = 5'-methyluridine-3'-phosphate
  modified_base 11: mod_base = OTHER; note = 5'-methyluridine-3'-phosphate
  modified_base 13: mod_base = OTHER; note = 5'-methyluridine-3'-phosphate
acgggttccatatccaaaggcag

SEQ ID NO: 1566 - RNA, 23 nt, synthetic construct
  source 1..23: mol_type = other RNA
  modified_base 8: mod_base = OTHER; note = 5'-methyluridine-3'-phosphate
  modified_base 10: mod_base = OTHER; note = 5'-methyluridine-3'-phosphate
  modified_base 14: mod_base = OTHER; note = 5'-methyluridine-3'-phosphate
  modified_base 20: mod_base = OTHER; note = 5'-methyluridine-3'-phosphate
  modified_base 22: mod_base = OTHER; note = 5'-methyluridine-3'-phosphate
caggagctgtgaatccaactgta

SEQ ID NO: 1567 - RNA, 23 nt, synthetic construct
  source 1..23: mol_type = other RNA
  modified_base 2: mod_base = OTHER; note = 5'-methyluridine-3'-phosphate
  modified_base 4: mod_base = OTHER; note = 5'-methyluridine-3'-phosphate
  modified_base 8: mod_base = OTHER; note = 5'-methyluridine-3'-phosphate
  modified_base 14: mod_base = OTHER; note = 5'-methyluridine-3'-phosphate
  modified_base 16: mod_base = OTHER; note = 5'-methyluridine-3'-phosphate
  modified_base 21: mod_base = OTHER; note = 5'-methyluridine-3'-phosphate
  modified_base 22: mod_base = OTHER; note = 5'-methyluridine-3'-phosphate
ctgtgaatccaactgtaaagttc

SEQ ID NO: 1568 - RNA, 23 nt, synthetic construct
  source 1..23: mol_type = other RNA
  modified_base 1: mod_base = OTHER; note = 5'-methyluridine-3'-phosphate
  modified_base 7: mod_base = OTHER; note = 5'-methyluridine-3'-phosphate
  modified_base 9: mod_base = OTHER; note = 5'-methyluridine-3'-phosphate
  modified_base 14: mod_base = OTHER; note = 5'-methyluridine-3'-phosphate
  modified_base 15: mod_base = OTHER; note = 5'-methyluridine-3'-phosphate
  modified_base 17: mod_base = OTHER; note = 5'-methyluridine-3'-phosphate
  modified_base 18: mod_base = OTHER; note = 5'-methyluridine-3'-phosphate
  modified_base 19: mod_base = OTHER; note = 5'-methyluridine-3'-phosphate
  modified_base 21: mod_base = OTHER; note = 5'-methyluridine-3'-phosphate
  modified_base 22: mod_base = OTHER; note = 5'-methyluridine-3'-phosphate
tccaactgtaaagttctttgttg

SEQ ID NO: 1569 - RNA, 23 nt, synthetic construct
  source 1..23: mol_type = other RNA
  modified_base 3: mod_base = OTHER; note = 5'-methyluridine-3'-phosphate
  modified_base 4: mod_base = OTHER; note = 5'-methyluridine-3'-phosphate
  modified_base 6: mod_base = OTHER; note = 5'-methyluridine-3'-phosphate
  modified_base 7: mod_base = OTHER; note = 5'-methyluridine-3'-phosphate
  modified_base 8: mod_base = OTHER; note = 5'-methyluridine-3'-phosphate
  modified_base 10: mod_base = OTHER; note = 5'-methyluridine-3'-phosphate
  modified_base 11: mod_base = OTHER; note = 5'-methyluridine-3'-phosphate
  modified_base 13: mod_base = OTHER; note = 5'-methyluridine-3'-phosphate
  modified_base 17: mod_base = OTHER; note = 5'-methyluridine-3'-phosphate
agttctttgttgtaaatacagac

SEQ ID NO: 1570 - RNA, 23 nt, synthetic construct
  source 1..23: mol_type = other RNA
  modified_base 1: mod_base = OTHER; note = 5'-methyluridine-3'-phosphate
  modified_base 2: mod_base = OTHER; note = 5'-methyluridine-3'-phosphate
  modified_base 4: mod_base = OTHER; note = 5'-methyluridine-3'-phosphate
  modified_base 5: mod_base = OTHER; note = 5'-methyluridine-3'-phosphate
  modified_base 7: mod_base = OTHER; note = 5'-methyluridine-3'-phosphate
  modified_base 11: mod_base = OTHER; note = 5'-methyluridine-3'-phosphate
  modified_base 18: mod_base = OTHER; note = 5'-methyluridine-3'-phosphate
  modified_base 20: mod_base = OTHER; note = 5'-methyluridine-3'-phosphate
  modified_base 22: mod_base = OTHER; note = 5'-methyluridine-3'-phosphate
ttgttgtaaatacagactctctc

SEQ ID NO: 1571 - RNA, 23 nt, synthetic construct
  source 1..23: mol_type = other RNA
  modified_base 7: mod_base = OTHER; note = 5'-methyluridine-3'-phosphate
  modified_base 9: mod_base = OTHER; note = 5'-methyluridine-3'-phosphate
  modified_base 11: mod_base = OTHER; note = 5'-methyluridine-3'-phosphate
  modified_base 16: mod_base = OTHER; note = 5'-methyluridine-3'-phosphate
  modified_base 20: mod_base = OTHER; note = 5'-methyluridine-3'-phosphate
acagactctctcagctcagtcac

SEQ ID NO: 1572 - RNA, 23 nt, synthetic construct
  source 1..23: mol_type = other RNA
  modified_base 1: mod_base = OTHER; note = 5'-methyluridine-3'-phosphate
  modified_base 3: mod_base = OTHER; note = 5'-methyluridine-3'-phosphate
  modified_base 5: mod_base = OTHER; note = 5'-methyluridine-3'-phosphate
  modified_base 10: mod_base = OTHER; note = 5'-methyluridine-3'-phosphate
  modified_base 14: mod_base = OTHER; note = 5'-methyluridine-3'-phosphate
  modified_base 21: mod_base = OTHER; note = 5'-methyluridine-3'-phosphate
tctctcagctcagtcaccaatgc

SEQ ID NO: 1573 - RNA, 23 nt, synthetic construct
  source 1..23: mol_type = other RNA
  modified_base 3: mod_base = OTHER; note = 5'-methyluridine-3'-phosphate
  modified_base 7: mod_base = OTHER; note = 5'-methyluridine-3'-phosphate
  modified_base 14: mod_base = OTHER; note = 5'-methyluridine-3'-phosphate
  modified_base 20: mod_base = OTHER; note = 5'-methyluridine-3'-phosphate
  modified_base 21: mod_base = OTHER; note = 5'-methyluridine-3'-phosphate
gctcagtcaccaatgcaacttcc

SEQ ID NO: 1574 - RNA, 23 nt, synthetic construct
  source 1..23: mol_type = other RNA
  modified_base 7: mod_base = OTHER; note = 5'-methyluridine-3'-phosphate
  modified_base 13: mod_base = OTHER; note = 5'-methyluridine-3'-phosphate
  modified_base 14: mod_base = OTHER; note = 5'-methyluridine-3'-phosphate
  modified_base 18: mod_base = OTHER; note = 5'-methyluridine-3'-phosphate
caccaatgcaacttccatacaaa

SEQ ID NO: 1575 - RNA, 23 nt, synthetic construct
  source 1..23: mol_type = other RNA
  modified_base 1: mod_base = OTHER; note = 5'-methyluridine-3'-phosphate
  modified_base 7: mod_base = OTHER; note = 5'-methyluridine-3'-phosphate
  modified_base 8: mod_base = OTHER; note = 5'-methyluridine-3'-phosphate
  modified_base 12: mod_base = OTHER; note = 5'-methyluridine-3'-phosphate
  modified_base 18: mod_base = OTHER; note = 5'-methyluridine-3'-phosphate
  modified_base 22: mod_base = OTHER; note = 5'-methyluridine-3'-phosphate
tgcaacttccatacaaatcactg

SEQ ID NO: 1576 - RNA, 23 nt, synthetic construct
  source 1..23: mol_type = other RNA
  modified_base 1: mod_base = OTHER; note = 5'-methyluridine-3'-phosphate
  modified_base 2: mod_base = OTHER; note = 5'-methyluridine-3'-phosphate
  modified_base 6: mod_base = OTHER; note = 5'-methyluridine-3'-phosphate
  modified_base 12: mod_base = OTHER; note = 5'-methyluridine-3'-phosphate
  modified_base 16: mod_base = OTHER; note = 5'-methyluridine-3'-phosphate
  modified_base 19: mod_base = OTHER; note = 5'-methyluridine-3'-phosphate
  modified_base 22: mod_base = OTHER; note = 5'-methyluridine-3'-phosphate
ttccatacaaatcactgctcctg

SEQ ID NO: 1577 - RNA, 23 nt, synthetic construct
  source 1..23: mol_type = other RNA
  modified_base 4: mod_base = OTHER; note = 5'-methyluridine-3'-phosphate
  modified_base 8: mod_base = OTHER; note = 5'-methyluridine-3'-phosphate
  modified_base 11: mod_base = OTHER; note = 5'-methyluridine-3'-phosphate
  modified_base 14: mod_base = OTHER; note = 5'-methyluridine-3'-phosphate
  modified_base 17: mod_base = OTHER; note = 5'-methyluridine-3'-phosphate
  modified_base 18: mod_base = OTHER; note = 5'-methyluridine-3'-phosphate
  modified_base 20: mod_base = OTHER; note = 5'-methyluridine-3'-phosphate
  modified_base 22: mod_base = OTHER; note = 5'-methyluridine-3'-phosphate
aaatcactgctcctgcttctatg

SEQ ID NO: 1578 - RNA, 23 nt, synthetic construct
  source 1..23: mol_type = other RNA
  modified_base 3: mod_base = OTHER; note = 5'-methyluridine-3'-phosphate
  modified_base 6: mod_base = OTHER; note = 5'-methyluridine-3'-phosphate
  modified_base 9: mod_base = OTHER; note = 5'-methyluridine-3'-phosphate
  modified_base 10: mod_base = OTHER; note = 5'-methyluridine-3'-phosphate
  modified_base 12: mod_base = OTHER; note = 5'-methyluridine-3'-phosphate
  modified_base 14: mod_base = OTHER; note = 5'-methyluridine-3'-phosphate
  modified_base 16: mod_base = OTHER; note = 5'-methyluridine-3'-phosphate
  modified_base 17: mod_base = OTHER; note = 5'-methyluridine-3'-phosphate
  modified_base 20: mod_base = OTHER; note = 5'-methyluridine-3'-phosphate
gctcctgcttctatgttgatagg

SEQ ID NO: 1579 - RNA, 23 nt, synthetic construct
  source 1..23: mol_type = other RNA
  modified_base 5: mod_base = OTHER; note = 5'-methyluridine-3'-phosphate
  modified_base 9: mod_base = OTHER; note = 5'-methyluridine-3'-phosphate
  modified_base 12: mod_base = OTHER; note = 5'-methyluridine-3'-phosphate
  modified_base 13: mod_base = OTHER; note = 5'-methyluridine-3'-phosphate
  modified_base 15: mod_base = OTHER; note = 5'-methyluridine-3'-phosphate
  modified_base 17: mod_base = OTHER; note = 5'-methyluridine-3'-phosphate
  modified_base 20: mod_base = OTHER; note = 5'-methyluridine-3'-phosphate
  modified_base 22: mod_base = OTHER; note = 5'-methyluridine-3'-phosphate
gggatcactacttgtgtgatgtg

SEQ ID NO: 1580 - RNA, 23 nt, synthetic construct
  source 1..23: mol_type = other RNA
  modified_base 3: mod_base = OTHER; note = 5'-methyluridine-3'-phosphate
  modified_base 6: mod_base = OTHER; note = 5'-methyluridine-3'-phosphate
  modified_base 7: mod_base = OTHER; note = 5'-methyluridine-3'-phosphate
  modified_base 9: mod_base = OTHER; note = 5'-methyluridine-3'-phosphate
  modified_base 11: mod_base = OTHER; note = 5'-methyluridine-3'-phosphate
  modified_base 14: mod_base = OTHER; note = 5'-methyluridine-3'-phosphate
  modified_base 16: mod_base = OTHER; note = 5'-methyluridine-3'-phosphate
  modified_base 21: mod_base = OTHER; note = 5'-methyluridine-3'-phosphate
actacttgtgtgatgtgacatgg

SEQ ID NO: 1581 - RNA, 23 nt, synthetic construct
  source 1..23: mol_type = other RNA
  modified_base 1: mod_base = OTHER; note = 5'-methyluridine-3'-phosphate
  modified_base 3: mod_base = OTHER; note = 5'-methyluridine-3'-phosphate
  modified_base 8: mod_base = OTHER; note = 5'-methyluridine-3'-phosphate
tgtgacatgggcaacacaagaaa

SEQ ID NO: 1582 - RNA, 23 nt, synthetic construct
  source 1..23: mol_type = other RNA
  modified_base 2: mod_base = OTHER; note = 5'-methyluridine-3'-phosphate
  modified_base 21: mod_base = OTHER; note = 5'-methyluridine-3'-phosphate
  modified_base 22: mod_base = OTHER; note = 5'-methyluridine-3'-phosphate
  modified_base 23: mod_base = OTHER; note = 5'-methyluridine
atgggcaacacaagaaagaattt

SEQ ID NO: 1583 - RNA, 23 nt, synthetic construct
  source 1..23: mol_type = other RNA
  modified_base 15: mod_base = OTHER; note = 5'-methyluridine-3'-phosphate
  modified_base 16: mod_base = OTHER; note = 5'-methyluridine-3'-phosphate
  modified_base 17: mod_base = OTHER; note = 5'-methyluridine-3'-phosphate
  modified_base 19: mod_base = OTHER; note = 5'-methyluridine-3'-phosphate
  modified_base 20: mod_base = OTHER; note = 5'-methyluridine-3'-phosphate
  modified_base 21: mod_base = OTHER; note = 5'-methyluridine-3'-phosphate
aacacaagaaagaatttctttgc

SEQ ID NO: 1584 - RNA, 23 nt, synthetic construct
  source 1..23: mol_type = other RNA
  modified_base 9: mod_base = OTHER; note = 5'-methyluridine-3'-phosphate
  modified_base 10: mod_base = OTHER; note = 5'-methyluridine-3'-phosphate
  modified_base 11: mod_base = OTHER; note = 5'-methyluridine-3'-phosphate
  modified_base 13: mod_base = OTHER; note = 5'-methyluridine-3'-phosphate
  modified_base 14: mod_base = OTHER; note = 5'-methyluridine-3'-phosphate
  modified_base 15: mod_base = OTHER; note = 5'-methyluridine-3'-phosphate
  modified_base 20: mod_base = OTHER; note = 5'-methyluridine-3'-phosphate
agaaagaatttctttgcagtggc

SEQ ID NO: 1585 - RNA, 23 nt, synthetic construct
  source 1..23: mol_type = other RNA
  modified_base 4: mod_base = OTHER; note = 5'-methyluridine-3'-phosphate
  modified_base 8: mod_base = OTHER; note = 5'-methyluridine-3'-phosphate
  modified_base 17: mod_base = OTHER; note = 5'-methyluridine-3'-phosphate
  modified_base 18: mod_base = OTHER; note = 5'-methyluridine-3'-phosphate
cagtggctcaggaggattcagaa

SEQ ID NO: 1586 - RNA, 23 nt, synthetic construct
  source 1..23: mol_type = other RNA
  modified_base 2: mod_base = OTHER; note = 5'-methyluridine-3'-phosphate
  modified_base 11: mod_base = OTHER; note = 5'-methyluridine-3'-phosphate
  modified_base 12: mod_base = OTHER; note = 5'-methyluridine-3'-phosphate
  modified_base 19: mod_base = OTHER; note = 5'-methyluridine-3'-phosphate
  modified_base 21: mod_base = OTHER; note = 5'-methyluridine-3'-phosphate
  modified_base 22: mod_base = OTHER; note = 5'-methyluridine-3'-phosphate
ctcaggaggattcagaactattc

SEQ ID NO: 1587 - RNA, 23 nt, synthetic construct
  source 1..23: mol_type = other RNA
  modified_base 5: mod_base = OTHER; note = 5'-methyluridine-3'-phosphate
  modified_base 6: mod_base = OTHER; note = 5'-methyluridine-3'-phosphate
  modified_base 13: mod_base = OTHER; note = 5'-methyluridine-3'-phosphate
  modified_base 15: mod_base = OTHER; note = 5'-methyluridine-3'-phosphate
  modified_base 16: mod_base = OTHER; note = 5'-methyluridine-3'-phosphate
  modified_base 20: mod_base = OTHER; note = 5'-methyluridine-3'-phosphate
  modified_base 23: mod_base = OTHER; note = 5'-methyluridine
aggattcagaactattcggtcat

SEQ ID NO: 1588 - RNA, 23 nt, synthetic construct
  source 1..23: mol_type = other RNA
  modified_base 4: mod_base = OTHER; note = 5'-methyluridine-3'-phosphate
  modified_base 6: mod_base = OTHER; note = 5'-methyluridine-3'-phosphate
  modified_base 7: mod_base = OTHER; note = 5'-methyluridine-3'-phosphate
  modified_base 11: mod_base = OTHER; note = 5'-methyluridine-3'-phosphate
  modified_base 14: mod_base = OTHER; note = 5'-methyluridine-3'-phosphate
  modified_base 18: mod_base = OTHER; note = 5'-methyluridine-3'-phosphate
  modified_base 20: mod_base = OTHER; note = 5'-methyluridine-3'-phosphate
  modified_base 21: mod_base = OTHER; note = 5'-methyluridine-3'-phosphate
  modified_base 22: mod_base = OTHER; note = 5'-methyluridine-3'-phosphate
aactattcggtcatggatatttg

SEQ ID NO: 1589 - RNA, 23 nt, synthetic construct
  source 1..23: mol_type = other RNA
  modified_base 1: mod_base = OTHER; note = 5'-methyluridine-3'-phosphate
  modified_base 5: mod_base = OTHER; note = 5'-methyluridine-3'-phosphate
  modified_base 8: mod_base = OTHER; note = 5'-methyluridine-3'-phosphate
  modified_base 12: mod_base = OTHER; note = 5'-methyluridine-3'-phosphate
  modified_base 14: mod_base = OTHER; note = 5'-methyluridine-3'-phosphate
  modified_base 15: mod_base = OTHER; note = 5'-methyluridine-3'-phosphate
  modified_base 16: mod_base = OTHER; note = 5'-methyluridine-3'-phosphate
  modified_base 18: mod_base = OTHER; note = 5'-methyluridine-3'-phosphate
  modified_base 22: mod_base = OTHER; note = 5'-methyluridine-3'-phosphate
tcggtcatggatatttgtgacta

SEQ ID NO: 1590 - RNA, 23 nt, synthetic construct
  source 1..23: mol_type = other RNA
  modified_base 2: mod_base = OTHER; note = 5'-methyluridine-3'-phosphate
  modified_base 6: mod_base = OTHER; note = 5'-methyluridine-3'-phosphate
  modified_base 8: mod_base = OTHER; note = 5'-methyluridine-3'-phosphate
  modified_base 9: mod_base = OTHER; note = 5'-methyluridine-3'-phosphate
  modified_base 10: mod_base = OTHER; note = 5'-methyluridine-3'-phosphate
  modified_base 12: mod_base = OTHER; note = 5'-methyluridine-3'-phosphate
  modified_base 16: mod_base = OTHER; note = 5'-methyluridine-3'-phosphate
  modified_base 18: mod_base = OTHER; note = 5'-methyluridine-3'-phosphate
  modified_base 21: mod_base = OTHER; note = 5'-methyluridine-3'-phosphate
atggatatttgtgactatgatga

SEQ ID NO: 1591 - RNA, 23 nt, synthetic construct
  source 1..23: mol_type = other RNA
  modified_base 1: mod_base = OTHER; note = 5'-methyluridine-3'-phosphate
  modified_base 2: mod_base = OTHER; note = 5'-methyluridine-3'-phosphate
  modified_base 3: mod_base = OTHER; note = 5'-methyluridine-3'-phosphate
  modified_base 5: mod_base = OTHER; note = 5'-methyluridine-3'-phosphate
  modified_base 9: mod_base = OTHER; note = 5'-methyluridine-3'-phosphate
  modified_base 11: mod_base = OTHER; note = 5'-methyluridine-3'-phosphate
  modified_base 14: mod_base = OTHER; note = 5'-methyluridine-3'-phosphate
  modified_base 18: mod_base = OTHER; note = 5'-methyluridine-3'-phosphate
  modified_base 23: mod_base = OTHER; note = 5'-methyluridine
tttgtgactatgatgaatccagt

SEQ ID NO: 1592 - RNA, 23 nt, synthetic construct
  source 1..23: mol_type = other RNA
  modified_base 2: mod_base = OTHER; note = 5'-methyluridine-3'-phosphate
  modified_base 5: mod_base = OTHER; note = 5'-methyluridine-3'-phosphate
  modified_base 9: mod_base = OTHER; note = 5'-methyluridine-3'-phosphate
  modified_base 14: mod_base = OTHER; note = 5'-methyluridine-3'-phosphate
  modified_base 21: mod_base = OTHER; note = 5'-methyluridine-3'-phosphate
atgatgaatccagtggaagatgg

SEQ ID NO: 1593 - RNA, 23 nt, synthetic construct
  source 1..23: mol_type = other RNA
  modified_base 1: mod_base = OTHER; note = 5'-methyluridine-3'-phosphate
  modified_base 6: mod_base = OTHER; note = 5'-methyluridine-3'-phosphate
  modified_base 13: mod_base = OTHER; note = 5'-methyluridine-3'-phosphate
  modified_base 19: mod_base = OTHER; note = 5'-methyluridine-3'-phosphate
  modified_base 22: mod_base = OTHER; note = 5'-methyluridine-3'-phosphate
  modified_base 23: mod_base = OTHER; note = 5'-methyluridine
tccagtggaagatggaactgctt

SEQ ID NO: 1594 - RNA, 23 nt, synthetic construct
  source 1..23: mol_type = other RNA
  modified_base 7: mod_base = OTHER; note = 5'-methyluridine-3'-phosphate
  modified_base 13: mod_base = OTHER; note = 5'-methyluridine-3'-phosphate
  modified_base 16: mod_base = OTHER; note = 5'-methyluridine-3'-phosphate
  modified_base 17: mod_base = OTHER; note = 5'-methyluridine-3'-phosphate
  modified_base 20: mod_base = OTHER; note = 5'-methyluridine-3'-phosphate
ggaagatggaactgcttagtggc

SEQ ID NO: 1595 - RNA, 23 nt, synthetic construct
  source 1..23: mol_type = other RNA
  modified_base 5: mod_base = OTHER; note = 5'-methyluridine-3'-phosphate
  modified_base 8: mod_base = OTHER; note = 5'-methyluridine-3'-phosphate
  modified_base 9: mod_base = OTHER; note = 5'-methyluridine-3'-phosphate
  modified_base 12: mod_base = OTHER; note = 5'-methyluridine-3'-phosphate
gaactgcttagtggcacggcaac

SEQ ID NO: 1596 - RNA, 23 nt, synthetic construct
  source 1..23: mol_type = other RNA
  modified_base 2: mod_base = OTHER; note = 5'-methyluridine-3'-phosphate
  modified_base 3: mod_base = OTHER; note = 5'-methyluridine-3'-phosphate
  modified_base 6: mod_base = OTHER; note = 5'-methyluridine-3'-phosphate
  modified_base 21: mod_base = OTHER; note = 5'-methyluridine-3'-phosphate
  modified_base 22: mod_base = OTHER; note = 5'-methyluridine-3'-phosphate
cttagtggcacggcaacacattg

SEQ ID NO: 1597 - RNA, 23 nt, synthetic construct
  source 1..23: mol_type = other RNA
  modified_base 12: mod_base = OTHER; note = 5'-methyluridine-3'-phosphate
  modified_base 13: mod_base = OTHER; note = 5'-methyluridine-3'-phosphate
  modified_base 18: mod_base = OTHER; note = 5'-methyluridine-3'-phosphate
  modified_base 22: mod_base = OTHER; note = 5'-methyluridine-3'-phosphate
acggcaacacattgaaatgagta

SEQ ID NO: 1598 - RNA, 23 nt, synthetic construct
  source 1..23: mol_type = other RNA
  modified_base 6: mod_base = OTHER; note = 5'-methyluridine-3'-phosphate
  modified_base 7: mod_base = OTHER; note = 5'-methyluridine-3'-phosphate
  modified_base 12: mod_base = OTHER; note = 5'-methyluridine-3'-phosphate
  modified_base 16: mod_base = OTHER; note = 5'-methyluridine-3'-phosphate
  modified_base 19: mod_base = OTHER; note = 5'-methyluridine-3'-phosphate
  modified_base 22: mod_base = OTHER; note = 5'-methyluridine-3'-phosphate
acacattgaaatgagtactactg

SEQ ID NO: 1599 - RNA, 23 nt, synthetic construct
  source 1..23: mol_type = other RNA
  modified_base 2: mod_base = OTHER; note = 5'-methyluridine-3'-phosphate
  modified_base 6: mod_base = OTHER; note = 5'-methyluridine-3'-phosphate
  modified_base 9: mod_base = OTHER; note = 5'-methyluridine-3'-phosphate
  modified_base 12: mod_base = OTHER; note = 5'-methyluridine-3'-phosphate
  modified_base 16: mod_base = OTHER; note = 5'-methyluridine-3'-phosphate
  modified_base 20: mod_base = OTHER; note = 5'-methyluridine-3'-phosphate
  modified_base 21: mod_base = OTHER; note = 5'-methyluridine-3'-phosphate
atgagtactactggctgggttgg

SEQ ID NO: 1600 - RNA, 23 nt, synthetic construct
  source 1..23: mol_type = other RNA
  modified_base 3: mod_base = OTHER; note = 5'-methyluridine-3'-phosphate
  modified_base 7: mod_base = OTHER; note = 5'-methyluridine-3'-phosphate
  modified_base 11: mod_base = OTHER; note = 5'-methyluridine-3'-phosphate
  modified_base 12: mod_base = OTHER; note = 5'-methyluridine-3'-phosphate
  modified_base 19: mod_base = OTHER; note = 5'-methyluridine-3'-phosphate
  modified_base 20: mod_base = OTHER; note = 5'-methyluridine-3'-phosphate
  modified_base 21: mod_base = OTHER; note = 5'-methyluridine-3'-phosphate
actggctgggttggaagatttag

SEQ ID NO: 1601 - RNA, 23 nt, synthetic construct
  source 1..23: mol_type = other RNA
  modified_base 1: mod_base = OTHER; note = 5'-methyluridine-3'-phosphate
  modified_base 5: mod_base = OTHER; note = 5'-methyluridine-3'-phosphate
  modified_base 6: mod_base = OTHER; note = 5'-methyluridine-3'-phosphate
  modified_base 13: mod_base = OTHER; note = 5'-methyluridine-3'-phosphate
  modified_base 14: mod_base = OTHER; note = 5'-methyluridine-3'-phosphate
  modified_base 15: mod_base = OTHER; note = 5'-methyluridine-3'-phosphate
  modified_base 21: mod_base = OTHER; note = 5'-methyluridine-3'-phosphate
  modified_base 22: mod_base = OTHER; note = 5'-methyluridine-3'-phosphate
tgggttggaagatttaggccttc

SEQ ID NO: 1602 - RNA, 23 nt, synthetic construct
  source 1..23: mol_type = other RNA
  modified_base 5: mod_base = OTHER; note = 5'-methyluridine-3'-phosphate
  modified_base 6: mod_base = OTHER; note = 5'-methyluridine-3'-phosphate
  modified_base 7: mod_base = OTHER; note = 5'-methyluridine-3'-phosphate
  modified_base 13: mod_base = OTHER; note = 5'-methyluridine-3'-phosphate
  modified_base 14: mod_base = OTHER; note = 5'-methyluridine-3'-phosphate
  modified_base 22: mod_base = OTHER; note = 5'-methyluridine-3'-phosphate
aagatttaggccttcagaacctc

SEQ ID NO: 1603 - RNA, 23 nt, synthetic construct
  source 1..23: mol_type = other RNA
  modified_base 5: mod_base = OTHER; note = 5'-methyluridine-3'-phosphate
  modified_base 6: mod_base = OTHER; note = 5'-methyluridine-3'-phosphate
  modified_base 14: mod_base = OTHER; note = 5'-methyluridine-3'-phosphate
  modified_base 17: mod_base = OTHER; note = 5'-methyluridine-3'-phosphate
  modified_base 18: mod_base = OTHER; note = 5'-methyluridine-3'-phosphate
  modified_base 19: mod_base = OTHER; note = 5'-methyluridine-3'-phosphate
  modified_base 20: mod_base = OTHER; note = 5'-methyluridine-3'-phosphate
ggccttcagaacctcattttacc

SEQ ID NO: 1604 - RNA, 23 nt, synthetic construct
  source 1..23: mol_type = other RNA
  modified_base 8: mod_base = OTHER; note = 5'-methyluridine-3'-phosphate
  modified_base 11: mod_base = OTHER; note = 5'-methyluridine-3'-phosphate
  modified_base 12: mod_base = OTHER; note = 5'-methyluridine-3'-phosphate
  modified_base 13: mod_base = OTHER; note = 5'-methyluridine-3'-phosphate
  modified_base 14: mod_base = OTHER; note = 5'-methyluridine-3'-phosphate
  modified_base 19: mod_base = OTHER; note = 5'-methyluridine-3'-phosphate
  modified_base 20: mod_base = OTHER; note = 5'-methyluridine-3'-phosphate
  modified_base 23: mod_base = OTHER; note = 5'-methyluridine
cagaacctcattttacccttgat

SEQ ID NO: 1605 - RNA, 23 nt, synthetic construct
  source 1..23: mol_type = other RNA
  modified_base 2: mod_base = OTHER; note = 5'-methyluridine-3'-phosphate
  modified_base 5: mod_base = OTHER; note = 5'-methyluridine-3'-phosphate
  modified_base 6: mod_base = OTHER; note = 5'-methyluridine-3'-phosphate
  modified_base 7: mod_base = OTHER; note = 5'-methyluridine-3'-phosphate
  modified_base 8: mod_base = OTHER; note = 5'-methyluridine-3'-phosphate
  modified_base 13: mod_base = OTHER; note = 5'-methyluridine-3'-phosphate
  modified_base 14: mod_base = OTHER; note = 5'-methyluridine-3'-phosphate
  modified_base 17: mod_base = OTHER; note = 5'-methyluridine-3'-phosphate
  modified_base 20: mod_base = OTHER; note = 5'-methyluridine-3'-phosphate
  modified_base 23: mod_base = OTHER; note = 5'-methyluridine
ctcattttacccttgatggtaat

SEQ ID NO: 1606 - RNA, 23 nt, synthetic construct
  source 1..23: mol_type = other RNA
  modified_base 1: mod_base = OTHER; note = 5'-methyluridine-3'-phosphate
  modified_base 2: mod_base = OTHER; note = 5'-methyluridine-3'-phosphate
  modified_base 7: mod_base = OTHER; note = 5'-methyluridine-3'-phosphate
  modified_base 8: mod_base = OTHER; note = 5'-methyluridine-3'-phosphate
  modified_base 11: mod_base = OTHER; note = 5'-methyluridine-3'-phosphate
  modified_base 14: mod_base = OTHER; note = 5'-methyluridine-3'-phosphate
  modified_base 17: mod_base = OTHER; note = 5'-methyluridine-3'-phosphate
  modified_base 21: mod_base = OTHER; note = 5'-methyluridine-3'-phosphate
  modified_base 22: mod_base = OTHER; note = 5'-methyluridine-3'-phosphate
ttacccttgatggtaatagcttc

SEQ ID NO: 1607 - RNA, 23 nt, synthetic construct
  source 1..23: mol_type = other RNA
  modified_base 1: mod_base = OTHER; note = 5'-methyluridine-3'-phosphate
  modified_base 4: mod_base = OTHER; note = 5'-methyluridine-3'-phosphate
  modified_base 7: mod_base = OTHER; note = 5'-methyluridine-3'-phosphate
  modified_base 10: mod_base = OTHER; note = 5'-methyluridine-3'-phosphate
  modified_base 14: mod_base = OTHER; note = 5'-methyluridine-3'-phosphate
  modified_base 15: mod_base = OTHER; note = 5'-methyluridine-3'-phosphate
  modified_base 17: mod_base = OTHER; note = 5'-methyluridine-3'-phosphate
tgatggtaatagcttctacaaga

SEQ ID NO: 1608 - RNA, 23 nt, synthetic construct
  source 1..23: mol_type = other RNA
  modified_base 3: mod_base = OTHER; note = 5'-methyluridine-3'-phosphate
  modified_base 7: mod_base = OTHER; note = 5'-methyluridine-3'-phosphate
  modified_base 8: mod_base = OTHER; note = 5'-methyluridine-3'-phosphate
  modified_base 10: mod_base = OTHER; note = 5'-methyluridine-3'-phosphate
  modified_base 17: mod_base = OTHER; note = 5'-methyluridine-3'-phosphate
  modified_base 20: mod_base = OTHER; note = 5'-methyluridine-3'-phosphate
aatagcttctacaagatcatcag

SEQ ID NO: 1609 - RNA, 23 nt, synthetic construct
  source 1..23: mol_type = other RNA
  modified_base 1: mod_base = OTHER; note = 5'-methyluridine-3'-phosphate
  modified_base 8: mod_base = OTHER; note = 5'-methyluridine-3'-phosphate
  modified_base 11: mod_base = OTHER; note = 5'-methyluridine-3'-phosphate
  modified_base 18: mod_base = OTHER; note = 5'-methyluridine-3'-phosphate
tacaagatcatcagcaatgaaga

SEQ ID NO: 1610 - RNA, 23 nt, synthetic construct
  source 1..23: mol_type = other RNA
  modified_base 1: mod_base = OTHER; note = 5'-methyluridine-3'-phosphate
  modified_base 8: mod_base = OTHER; note = 5'-methyluridine-3'-phosphate
  modified_base 17: mod_base = OTHER; note = 5'-methyluridine-3'-phosphate
  modified_base 18: mod_base = OTHER; note = 5'-methyluridine-3'-phosphate
tcagcaatgaagaaggttacaga

SEQ ID NO: 1611 - RNA, 23 nt, synthetic construct
  source 1..23: mol_type = other RNA
  modified_base 8: mod_base = OTHER; note = 5'-methyluridine-3'-phosphate
  modified_base 9: mod_base = OTHER; note = 5'-methyluridine-3'-phosphate
  modified_base 19: mod_base = OTHER; note = 5'-methyluridine-3'-phosphate
  modified_base 20: mod_base = OTHER; note = 5'-methyluridine-3'-phosphate
  modified_base 21: mod_base = OTHER; note = 5'-methyluridine-3'-phosphate
aagaaggttacagacacatttgc

SEQ ID NO: 1612 - RNA, 23 nt, synthetic construct
  source 1..23: mol_type = other RNA
  modified_base 1: mod_base = OTHER; note = 5'-methyluridine-3'-phosphate
  modified_base 2: mod_base = OTHER; note = 5'-methyluridine-3'-phosphate
  modified_base 12: mod_base = OTHER; note = 5'-methyluridine-3'-phosphate
  modified_base 13: mod_base = OTHER; note = 5'-methyluridine-3'-phosphate
  modified_base 14: mod_base = OTHER; note = 5'-methyluridine-3'-phosphate
  modified_base 17: mod_base = OTHER; note = 5'-methyluridine-3'-phosphate
  modified_base 19: mod_base = OTHER; note = 5'-methyluridine-3'-phosphate
  modified_base 20: mod_base = OTHER; note = 5'-methyluridine-3'-phosphate
  modified_base 21: mod_base = OTHER; note = 5'-methyluridine-3'-phosphate
ttacagacacatttgctatttcc

SEQ ID NO: 1613 - RNA, 23 nt, synthetic construct
  source 1..23: mol_type = other RNA
  modified_base 5: mod_base = OTHER; note = 5'-methyluridine-3'-phosphate
  modified_base 6: mod_base = OTHER; note = 5'-methyluridine-3'-phosphate
  modified_base 7: mod_base = OTHER; note = 5'-methyluridine-3'-phosphate
  modified_base 10: mod_base = OTHER; note = 5'-methyluridine-3'-phosphate
  modified_base 12: mod_base = OTHER; note = 5'-methyluridine-3'-phosphate
  modified_base 13: mod_base = OTHER; note = 5'-methyluridine-3'-phosphate
  modified_base 14: mod_base = OTHER; note = 5'-methyluridine-3'-phosphate
  modified_base 20: mod_base = OTHER; note = 5'-methyluridine-3'-phosphate
cacatttgctatttccaaataga

SEQ ID NO: 1614 - RNA, 23 nt, synthetic construct
  source 1..23: mol_type = other RNA
  modified_base 6: mod_base = OTHER; note = 5'-methyluridine-3'-phosphate
  modified_base 12: mod_base = OTHER; note = 5'-methyluridine-3'-phosphate
  modified_base 13: mod_base = OTHER; note = 5'-methyluridine-3'-phosphate
  modified_base 14: mod_base = OTHER; note = 5'-methyluridine-3'-phosphate
  modified_base 16: mod_base = OTHER; note = 5'-methyluridine-3'-phosphate
  modified_base 17: mod_base = OTHER; note = 5'-methyluridine-3'-phosphate
aagactgcacatttattacaaaa

SEQ ID NO: 1615 - RNA, 23 nt, synthetic construct
  source 1..23: mol_type = other RNA
  modified_base 6: mod_base = OTHER; note = 5'-methyluridine-3'-phosphate
  modified_base 7: mod_base = OTHER; note = 5'-methyluridine-3'-phosphate
  modified_base 8: mod_base = OTHER; note = 5'-methyluridine-3'-phosphate
  modified_base 10: mod_base = OTHER; note = 5'-methyluridine-3'-phosphate
  modified_base 11: mod_base = OTHER; note = 5'-methyluridine-3'-phosphate
gcacatttattacaaaaggcacc

SEQ ID NO: 1616 - RNA, 23 nt, synthetic construct
  source 1..23: mol_type = other RNA
  modified_base 1: mod_base = OTHER; note = 5'-methyluridine-3'-phosphate
  modified_base 3: mod_base = OTHER; note = 5'-methyluridine-3'-phosphate
  modified_base 4: mod_base = OTHER; note = 5'-methyluridine-3'-phosphate
  modified_base 17: mod_base = OTHER; note = 5'-methyluridine-3'-phosphate
tattacaaaaggcacctgggaag

SEQ ID NO: 1617 - RNA, 23 nt, synthetic construct
  source 1..23: mol_type = other RNA
  modified_base 9: mod_base = OTHER; note = 5'-methyluridine-3'-phosphate
  modified_base 16: mod_base = OTHER; note = 5'-methyluridine-3'-phosphate
  modified_base 19: mod_base = OTHER; note = 5'-methyluridine-3'-phosphate
aaggcacctgggaagtcatcggg

SEQ ID NO: 1618 - RNA, 23 nt, synthetic construct
  source 1..23: mol_type = other RNA
  modified_base 3: mod_base = OTHER; note = 5'-methyluridine-3'-phosphate
  modified_base 10: mod_base = OTHER; note = 5'-methyluridine-3'-phosphate
  modified_base 13: mod_base = OTHER; note = 5'-methyluridine-3'-phosphate
  modified_base 19: mod_base = OTHER; note = 5'-methyluridine-3'-phosphate
cctgggaagtcatcgggatagaa

SEQ ID NO: 1619 - RNA, 23 nt, synthetic construct
  source 1..23: mol_type = other RNA
  modified_base 4: mod_base = OTHER; note = 5'-methyluridine-3'-phosphate
  modified_base 7: mod_base = OTHER; note = 5'-methyluridine-3'-phosphate
  modified_base 13: mod_base = OTHER; note = 5'-methyluridine-3'-phosphate
  modified_base 20: mod_base = OTHER; note = 5'-methyluridine-3'-phosphate
  modified_base 22: mod_base = OTHER; note = 5'-methyluridine-3'-phosphate
aagtcatcgggatagaagctcta

SEQ ID NO: 1620 - RNA, 23 nt, synthetic construct
  source 1..23: mol_type = other RNA
  modified_base 6: mod_base = OTHER; note = 5'-methyluridine-3'-phosphate
  modified_base 13: mod_base = OTHER; note = 5'-methyluridine-3'-phosphate
  modified_base 15: mod_base = OTHER; note = 5'-methyluridine-3'-phosphate
  modified_base 22: mod_base = OTHER; note = 5'-methyluridine-3'-phosphate
cgggatagaagctctaaccagtg

SEQ ID NO: 1621 - RNA, 23 nt, synthetic construct
  source 1..23: mol_type = other RNA
  modified_base 5: mod_base = OTHER; note = 5'-methyluridine-3'-phosphate
  modified_base 7: mod_base = OTHER; note = 5'-methyluridine-3'-phosphate
  modified_base 14: mod_base = OTHER; note = 5'-methyluridine-3'-phosphate
  modified_base 17: mod_base = OTHER; note = 5'-methyluridine-3'-phosphate
  modified_base 18: mod_base = OTHER; note = 5'-methyluridine-3'-phosphate
  modified_base 20: mod_base = OTHER; note = 5'-methyluridine-3'-phosphate
  modified_base 22: mod_base = OTHER; note = 5'-methyluridine-3'-phosphate
aagctctaaccagtgattatcta

SEQ ID NO: 1622 - RNA, 23 nt, synthetic construct
  source 1..23: mol_type = other RNA
  modified_base 1: mod_base = OTHER; note = 5'-methyluridine-3'-phosphate
  modified_base 8: mod_base = OTHER; note = 5'-methyluridine-3'-phosphate
  modified_base 11: mod_base = OTHER; note = 5'-methyluridine-3'-phosphate
  modified_base 12: mod_base = OTHER; note = 5'-methyluridine-3'-phosphate
  modified_base 14: mod_base = OTHER; note = 5'-methyluridine-3'-phosphate
  modified_base 16: mod_base = OTHER; note = 5'-methyluridine-3'-phosphate
  modified_base 18: mod_base = OTHER; note = 5'-methyluridine-3'-phosphate
  modified_base 21: mod_base = OTHER; note = 5'-methyluridine-3'-phosphate
taaccagtgattatctatactac

SEQ ID NO: 1623 - RNA, 23 nt, synthetic construct
  source 1..23: mol_type = other RNA
  modified_base 2: mod_base = OTHER; note = 5'-methyluridine-3'-phosphate
  modified_base 5: mod_base = OTHER; note = 5'-methyluridine-3'-phosphate
  modified_base 6: mod_base = OTHER; note = 5'-methyluridine-3'-phosphate
  modified_base 8: mod_base = OTHER; note = 5'-methyluridine-3'-phosphate
  modified_base 10: mod_base = OTHER; note = 5'-methyluridine-3'-phosphate
  modified_base 12: mod_base = OTHER; note = 5'-methyluridine-3'-phosphate
  modified_base 15: mod_base = OTHER; note = 5'-methyluridine-3'-phosphate
  modified_base 19: mod_base = OTHER; note = 5'-methyluridine-3'-phosphate
  modified_base 20: mod_base = OTHER; note = 5'-methyluridine-3'-phosphate
  modified_base 23: mod_base = OTHER; note = 5'-methyluridine
gtgattatctatactacattagt

SEQ ID NO: 1624 - RNA, 23 nt, synthetic construct
  source 1..23: mol_type = other RNA
  modified_base 3: mod_base = OTHER; note = 5'-methyluridine-3'-phosphate
  modified_base 6: mod_base = OTHER; note = 5'-methyluridine-3'-phosphate
  modified_base 10: mod_base = OTHER; note = 5'-methyluridine-3'-phosphate
  modified_base 12: mod_base = OTHER; note = 5'-methyluridine-3'-phosphate
  modified_base 20: mod_base = OTHER; note = 5'-methyluridine-3'-phosphate
agtaatgaatataaaggaatgcc

SEQ ID NO: 1625 - RNA, 23 nt, synthetic construct
  source 1..23: mol_type = other RNA
  modified_base 4: mod_base = OTHER; note = 5'-methyluridine-3'-phosphate
  modified_base 6: mod_base = OTHER; note = 5'-methyluridine-3'-phosphate
  modified_base 14: mod_base = OTHER; note = 5'-methyluridine-3'-phosphate
gaatataaaggaatgccaggagg

SEQ ID NO: 1626 - RNA, 23 nt, synthetic construct
  source 1..23: mol_type = other RNA
  modified_base 16: mod_base = OTHER; note = 5'-methyluridine-3'-phosphate
  modified_base 18: mod_base = OTHER; note = 5'-methyluridine-3'-phosphate
  modified_base 19: mod_base = OTHER; note = 5'-methyluridine-3'-phosphate
  modified_base 20: mod_base = OTHER; note = 5'-methyluridine-3'-phosphate
  modified_base 22: mod_base = OTHER; note = 5'-methyluridine-3'-phosphate
gccaggaggaaggaatctttata

SEQ ID NO: 1627 - RNA, 23 nt, synthetic construct
  source 1..23: mol_type = other RNA
  modified_base 10: mod_base = OTHER; note = 5'-methyluridine-3'-phosphate
  modified_base 12: mod_base = OTHER; note = 5'-methyluridine-3'-phosphate
  modified_base 13: mod_base = OTHER; note = 5'-methyluridine-3'-phosphate
  modified_base 14: mod_base = OTHER; note = 5'-methyluridine-3'-phosphate
  modified_base 16: mod_base = OTHER; note = 5'-methyluridine-3'-phosphate
  modified_base 21: mod_base = OTHER; note = 5'-methyluridine-3'-phosphate
aggaaggaatctttataaaatcc

SEQ ID NO: 1628 - RNA, 23 nt, synthetic construct
  source 1..23: mol_type = other RNA
  modified_base 2: mod_base = OTHER; note = 5'-methyluridine-3'-phosphate
  modified_base 3: mod_base = OTHER; note = 5'-methyluridine-3'-phosphate
  modified_base 4: mod_base = OTHER; note = 5'-methyluridine-3'-phosphate
  modified_base 6: mod_base = OTHER; note = 5'-methyluridine-3'-phosphate
  modified_base 11: mod_base = OTHER; note = 5'-methyluridine-3'-phosphate
  modified_base 17: mod_base = OTHER; note = 5'-methyluridine-3'-phosphate
  modified_base 18: mod_base = OTHER; note = 5'-methyluridine-3'-phosphate
  modified_base 21: mod_base = OTHER; note = 5'-methyluridine-3'-phosphate
ctttataaaatccaacttagtga

SEQ ID NO: 1629 - RNA, 23 nt, synthetic construct
  source 1..23: mol_type = other RNA
  modified_base 1: mod_base = OTHER; note = 5'-methyluridine-3'-phosphate
  modified_base 7: mod_base = OTHER; note = 5'-methyluridine-3'-phosphate
  modified_base 8: mod_base = OTHER; note = 5'-methyluridine-3'-phosphate
  modified_base 11: mod_base = OTHER; note = 5'-methyluridine-3'-phosphate
  modified_base 15: mod_base = OTHER; note = 5'-methyluridine-3'-phosphate
  modified_base 17: mod_base = OTHER; note = 5'-methyluridine-3'-phosphate
tccaacttagtgactatacaaaa

SEQ ID NO: 1630 - RNA, 23 nt, synthetic construct
  source 1..23: mol_type = other RNA
  modified_base 3: mod_base = OTHER; note = 5'-methyluridine-3'-phosphate
  modified_base 7: mod_base = OTHER; note = 5'-methyluridine-3'-phosphate
  modified_base 9: mod_base = OTHER; note = 5'-methyluridine-3'-phosphate
  modified_base 17: mod_base = OTHER; note = 5'-methyluridine-3'-phosphate
  modified_base 22: mod_base = OTHER; note = 5'-methyluridine-3'-phosphate
agtgactatacaaaagtgacatg

SEQ ID NO: 1631 - RNA, 23 nt, synthetic construct
  source 1..23: mol_type = other RNA
  modified_base 8: mod_base = OTHER; note = 5'-methyluridine-3'-phosphate
  modified_base 13: mod_base = OTHER; note = 5'-methyluridine-3'-phosphate
  modified_base 17: mod_base = OTHER; note = 5'-methyluridine-3'-phosphate
  modified_base 21: mod_base = OTHER; note = 5'-methyluridine-3'-phosphate
  modified_base 22: mod_base = OTHER; note = 5'-methyluridine-3'-phosphate
acaaaagtgacatgcctcagttg

SEQ ID NO: 1632 - RNA, 23 nt, synthetic construct
  source 1..23: mol_type = other RNA
  modified_base 1: mod_base = OTHER; note = 5'-methyluridine-3'-phosphate
  modified_base 5: mod_base = OTHER; note = 5'-methyluridine-3'-phosphate
  modified_base 9: mod_base = OTHER; note = 5'-methyluridine-3'-phosphate
  modified_base 10: mod_base = OTHER; note = 5'-methyluridine-3'-phosphate
  modified_base 12: mod_base = OTHER; note = 5'-methyluridine-3'-phosphate
  modified_base 17: mod_base = OTHER; note = 5'-methyluridine-3'-phosphate
  modified_base 21: mod_base = OTHER; note = 5'-methyluridine-3'-phosphate
tgcctcagttgtgagctgaatcc

SEQ ID NO: 1633 - RNA, 23 nt, synthetic construct
  source 1..23: mol_type = other RNA
  modified_base 2: mod_base = OTHER; note = 5'-methyluridine-3'-phosphate
  modified_base 7: mod_base = OTHER; note = 5'-methyluridine-3'-phosphate
  modified_base 11: mod_base = OTHER; note = 5'-methyluridine-3'-phosphate
  modified_base 21: mod_base = OTHER; note = 5'-methyluridine-3'-phosphate
  modified_base 23: mod_base = OTHER; note = 5'-methyluridine
gtgagctgaatccggaaaggtgt

SEQ ID NO: 1634 - RNA, 23 nt, synthetic construct
  source 1..23: mol_type = other RNA
  modified_base 2: mod_base = OTHER; note = 5'-methyluridine-3'-phosphate
  modified_base 12: mod_base = OTHER; note = 5'-methyluridine-3'-phosphate
  modified_base 14: mod_base = OTHER; note = 5'-methyluridine-3'-phosphate
  modified_base 18: mod_base = OTHER; note = 5'-methyluridine-3'-phosphate
  modified_base 21: mod_base = OTHER; note = 5'-methyluridine-3'-phosphate
  modified_base 23: mod_base = OTHER; note = 5'-methyluridine
atccggaaaggtgtcagtactat

SEQ ID NO: 1635 - RNA, 23 nt, synthetic construct
  source 1..23: mol_type = other RNA
  modified_base 6: mod_base = OTHER; note = 5'-methyluridine-3'-phosphate
  modified_base 8: mod_base = OTHER; note = 5'-methyluridine-3'-phosphate
  modified_base 12: mod_base = OTHER; note = 5'-methyluridine-3'-phosphate
  modified_base 15: mod_base = OTHER; note = 5'-methyluridine-3'-phosphate
  modified_base 17: mod_base = OTHER; note = 5'-methyluridine-3'-phosphate
  modified_base 18: mod_base = OTHER; note = 5'-methyluridine-3'-phosphate
  modified_base 20: mod_base = OTHER; note = 5'-methyluridine-3'-phosphate
  modified_base 22: mod_base = OTHER; note = 5'-methyluridine-3'-phosphate
aaaggtgtcagtactattctgtg

SEQ ID NO: 1636 - RNA, 23 nt, synthetic construct
  source 1..23: mol_type = other RNA
  modified_base 2: mod_base = OTHER; note = 5'-methyluridine-3'-phosphate
  modified_base 6: mod_base = OTHER; note = 5'-methyluridine-3'-phosphate
  modified_base 9: mod_base = OTHER; note = 5'-methyluridine-3'-phosphate
  modified_base 11: mod_base = OTHER; note = 5'-methyluridine-3'-phosphate
  modified_base 12: mod_base = OTHER; note = 5'-methyluridine-3'-phosphate
  modified_base 14: mod_base = OTHER; note = 5'-methyluridine-3'-phosphate
  modified_base 16: mod_base = OTHER; note = 5'-methyluridine-3'-phosphate
  modified_base 18: mod_base = OTHER; note = 5'-methyluridine-3'-phosphate
  modified_base 21: mod_base = OTHER; note = 5'-methyluridine-3'-phosphate
  modified_base 22: mod_base = OTHER; note = 5'-methyluridine-3'-phosphate
gtcagtactattctgtgtcattc

SEQ ID NO: 1637 - RNA, 23 nt, synthetic construct
  source 1..23: mol_type = other RNA
  modified_base 1: mod_base = OTHER; note = 5'-methyluridine-3'-phosphate
  modified_base 2: mod_base = OTHER; note = 5'-methyluridine-3'-phosphate
  modified_base 4: mod_base = OTHER; note = 5'-methyluridine-3'-phosphate
  modified_base 6: mod_base = OTHER; note = 5'-methyluridine-3'-phosphate
  modified_base 8: mod_base = OTHER; note = 5'-methyluridine-3'-phosphate
  modified_base 11: mod_base = OTHER; note = 5'-methyluridine-3'-phosphate
  modified_base 12: mod_base = OTHER; note = 5'-methyluridine-3'-phosphate
  modified_base 16: mod_base = OTHER; note = 5'-methyluridine-3'-phosphate
ttctgtgtcattcagtaaagagg

SEQ ID NO: 1638 - RNA, 23 nt, synthetic construct
  source 1..23: mol_type = other RNA
  modified_base 2: mod_base = OTHER; note = 5'-methyluridine-3'-phosphate
  modified_base 3: mod_base = OTHER; note = 5'-methyluridine-3'-phosphate
  modified_base 7: mod_base = OTHER; note = 5'-methyluridine-3'-phosphate
  modified_base 20: mod_base = OTHER; note = 5'-methyluridine-3'-phosphate
  modified_base 22: mod_base = OTHER; note = 5'-methyluridine-3'-phosphate
  modified_base 23: mod_base = OTHER; note = 5'-methyluridine
attcagtaaagaggcgaagtatt

SEQ ID NO: 1639 - RNA, 23 nt, synthetic construct
  source 1..23: mol_type = other RNA
  modified_base 12: mod_base = OTHER; note = 5'-methyluridine-3'-phosphate
  modified_base 14: mod_base = OTHER; note = 5'-methyluridine-3'-phosphate
  modified_base 15: mod_base = OTHER; note = 5'-methyluridine-3'-phosphate
  modified_base 17: mod_base = OTHER; note = 5'-methyluridine-3'-phosphate
  modified_base 22: mod_base = OTHER; note = 5'-methyluridine-3'-phosphate
aagaggcgaagtattatcagctg

SEQ ID NO: 1640 - RNA, 23 nt, synthetic construct
  source 1..23: mol_type = other RNA
  modified_base 4: mod_base = OTHER; note = 5'-methyluridine-3'-phosphate
  modified_base 6: mod_base = OTHER; note = 5'-methyluridine-3'-phosphate
  modified_base 7: mod_base = OTHER; note = 5'-methyluridine-3'-phosphate
  modified_base 9: mod_base = OTHER; note = 5'-methyluridine-3'-phosphate
  modified_base 14: mod_base = OTHER; note = 5'-methyluridine-3'-phosphate
  modified_base 19: mod_base = OTHER; note = 5'-methyluridine-3'-phosphate
  modified_base 21: mod_base = OTHER; note = 5'-methyluridine-3'-phosphate
  modified_base 22: mod_base = OTHER; note = 5'-methyluridine-3'-phosphate
aagtattatcagctgagatgttc

SEQ ID NO: 1641 - RNA, 23 nt, synthetic construct
  source 1..23: mol_type = other RNA
  modified_base 4: mod_base = OTHER; note = 5'-methyluridine-3'-phosphate
  modified_base 6: mod_base = OTHER; note = 5'-methyluridine-3'-phosphate
  modified_base 8: mod_base = OTHER; note = 5'-methyluridine-3'-phosphate
  modified_base 11: mod_base = OTHER; note = 5'-methyluridine-3'-phosphate
  modified_base 13: mod_base = OTHER; note = 5'-methyluridine-3'-phosphate
ccctctatactctacacagcagc

SEQ ID NO: 1642 - RNA, 23 nt, synthetic construct
  source 1..23: mol_type = other RNA
  modified_base 1: mod_base = OTHER; note = 5'-methyluridine-3'-phosphate
  modified_base 4: mod_base = OTHER; note = 5'-methyluridine-3'-phosphate
  modified_base 6: mod_base = OTHER; note = 5'-methyluridine-3'-phosphate
  modified_base 18: mod_base = OTHER; note = 5'-methyluridine-3'-phosphate
  modified_base 22: mod_base = OTHER; note = 5'-methyluridine-3'-phosphate
tactctacacagcagcgtgaatg

SEQ ID NO: 1643 - RNA, 23 nt, synthetic construct
  source 1..23: mol_type = other RNA
  modified_base 10: mod_base = OTHER; note = 5'-methyluridine-3'-phosphate
  modified_base 14: mod_base = OTHER; note = 5'-methyluridine-3'-phosphate
  modified_base 17: mod_base = OTHER; note = 5'-methyluridine-3'-phosphate
acagcagcgtgaatgataaaggg

SEQ ID NO: 1644 - RNA, 23 nt, synthetic construct
  source 1..23: mol_type = other RNA
  modified_base 1: mod_base = OTHER; note = 5'-methyluridine-3'-phosphate
  modified_base 5: mod_base = OTHER; note = 5'-methyluridine-3'-phosphate
  modified_base 8: mod_base = OTHER; note = 5'-methyluridine-3'-phosphate
  modified_base 16: mod_base = OTHER; note = 5'-methyluridine-3'-phosphate
  modified_base 22: mod_base = OTHER; note = 5'-methyluridine-3'-phosphate
tgaatgataaagggctgagagtc

SEQ ID NO: 1645 - RNA, 23 nt, synthetic construct
  source 1..23: mol_type = other RNA
  modified_base 7: mod_base = OTHER; note = 5'-methyluridine-3'-phosphate
  modified_base 13: mod_base = OTHER; note = 5'-methyluridine-3'-phosphate
  modified_base 16: mod_base = OTHER; note = 5'-methyluridine-3'-phosphate
aagggctgagagtcctggaagac

SEQ ID NO: 1646 - RNA, 23 nt, synthetic construct
  source 1..23: mol_type = other RNA
  modified_base 5: mod_base = OTHER; note = 5'-methyluridine-3'-phosphate
  modified_base 8: mod_base = OTHER; note = 5'-methyluridine-3'-phosphate
  modified_base 18: mod_base = OTHER; note = 5'-methyluridine-3'-phosphate
  modified_base 19: mod_base = OTHER; note = 5'-methyluridine-3'-phosphate
agagtcctggaagacaattcagc

SEQ ID NO: 1647 - RNA, 23 nt, synthetic construct
  source 1..23: mol_type = other RNA
  modified_base 10: mod_base = OTHER; note = 5'-methyluridine-3'-phosphate
  modified_base 11: mod_base = OTHER; note = 5'-methyluridine-3'-phosphate
  modified_base 16: mod_base = OTHER; note = 5'-methyluridine-3'-phosphate
  modified_base 17: mod_base = OTHER; note = 5'-methyluridine-3'-phosphate
  modified_base 18: mod_base = OTHER; note = 5'-methyluridine-3'-phosphate
  modified_base 22: mod_base = OTHER; note = 5'-methyluridine-3'-phosphate
ggaagacaattcagctttggata

SEQ ID NO: 1648 - RNA, 23 nt, synthetic construct
  source 1..23: mol_type = other RNA
  modified_base 2: mod_base = OTHER; note = 5'-methyluridine-3'-phosphate
  modified_base 3: mod_base = OTHER; note = 5'-methyluridine-3'-phosphate
  modified_base 8: mod_base = OTHER; note = 5'-methyluridine-3'-phosphate
  modified_base 9: mod_base = OTHER; note = 5'-methyluridine-3'-phosphate
  modified_base 10: mod_base = OTHER; note = 5'-methyluridine-3'-phosphate
  modified_base 14: mod_base = OTHER; note = 5'-methyluridine-3'-phosphate
  modified_base 19: mod_base = OTHER; note = 5'-methyluridine-3'-phosphate
  modified_base 22: mod_base = OTHER; note = 5'-methyluridine-3'-phosphate
attcagctttggataaaatgctg

SEQ ID NO: 1649 - RNA, 23 nt, synthetic construct
  source 1..23: mol_type = other RNA
  modified_base 1: mod_base = OTHER; note = 5'-methyluridine-3'-phosphate
  modified_base 5: mod_base = OTHER; note = 5'-methyluridine-3'-phosphate
  modified_base 10: mod_base = OTHER; note = 5'-methyluridine-3'-phosphate
  modified_base 13: mod_base = OTHER; note = 5'-methyluridine-3'-phosphate
  modified_base 20: mod_base = OTHER; note = 5'-methyluridine-3'-phosphate
  modified_base 22: mod_base = OTHER; note = 5'-methyluridine-3'-phosphate
tggataaaatgctgcagaatgtc

SEQ ID NO: 1650 - RNA, 23 nt, synthetic construct
  source 1..23: mol_type = other RNA
  modified_base 4: mod_base = OTHER; note = 5'-methyluridine-3'-phosphate
  modified_base 7: mod_base = OTHER; note = 5'-methyluridine-3'-phosphate
  modified_base 14: mod_base = OTHER; note = 5'-methyluridine-3'-phosphate
  modified_base 16: mod_base = OTHER; note = 5'-methyluridine-3'-phosphate
  modified_base 22: mod_base = OTHER; note = 5'-methyluridine-3'-phosphate
aaatgctgcagaatgtccagatg

SEQ ID NO: 1651 - RNA, 23 nt, synthetic construct
  source 1..23: mol_type = other RNA
  modified_base 4: mod_base = OTHER; note = 5'-methyluridine-3'-phosphate
  modified_base 9: mod_base = OTHER; note = 5'-methyluridine-3'-phosphate
  modified_base 10: mod_base = OTHER; note = 5'-methyluridine-3'-phosphate
  modified_base 13: mod_base = OTHER; note = 5'-methyluridine-3'-phosphate
  modified_base 14: mod_base = OTHER; note = 5'-methyluridine-3'-phosphate
  modified_base 16: mod_base = OTHER; note = 5'-methyluridine-3'-phosphate
  modified_base 17: mod_base = OTHER; note = 5'-methyluridine-3'-phosphate
  modified_base 18: mod_base = OTHER; note = 5'-methyluridine-3'-phosphate
  modified_base 19: mod_base = OTHER; note = 5'-methyluridine-3'-phosphate
  modified_base 23: mod_base = OTHER; note = 5'-methyluridine
aactggacttcattattttgaat

SEQ ID NO: 1652 - RNA, 23 nt, synthetic construct
  source 1..23: mol_type = other RNA
  modified_base 1: mod_base = OTHER; note = 5'-methyluridine-3'-phosphate
  modified_base 11: mod_base = OTHER; note = 5'-methyluridine-3'-phosphate
  modified_base 12: mod_base = OTHER; note = 5'-methyluridine-3'-phosphate
  modified_base 13: mod_base = OTHER; note = 5'-methyluridine-3'-phosphate
  modified_base 14: mod_base = OTHER; note = 5'-methyluridine-3'-phosphate
  modified_base 17: mod_base = OTHER; note = 5'-methyluridine-3'-phosphate
  modified_base 19: mod_base = OTHER; note = 5'-methyluridine-3'-phosphate
tgaaacaaaattttggtatcaga

SEQ ID NO: 1653 - RNA, 23 nt, synthetic construct
  source 1..23: mol_type = other RNA
  modified_base 1: mod_base = OTHER; note = 5'-methyluridine-3'-phosphate
  modified_base 2: mod_base = OTHER; note = 5'-methyluridine-3'-phosphate
  modified_base 3: mod_base = OTHER; note = 5'-methyluridine-3'-phosphate
  modified_base 4: mod_base = OTHER; note = 5'-methyluridine-3'-phosphate
  modified_base 7: mod_base = OTHER; note = 5'-methyluridine-3'-phosphate
  modified_base 9: mod_base = OTHER; note = 5'-methyluridine-3'-phosphate
  modified_base 14: mod_base = OTHER; note = 5'-methyluridine-3'-phosphate
  modified_base 17: mod_base = OTHER; note = 5'-methyluridine-3'-phosphate
  modified_base 19: mod_base = OTHER; note = 5'-methyluridine-3'-phosphate
  modified_base 20: mod_base = OTHER; note = 5'-methyluridine-3'-phosphate
ttttggtatcagatgatcttgcc

SEQ ID NO: 1654 - RNA, 23 nt, synthetic construct
  source 1..23: mol_type = other RNA
  modified_base 2: mod_base = OTHER; note = 5'-methyluridine-3'-phosphate
  modified_base 7: mod_base = OTHER; note = 5'-methyluridine-3'-phosphate
  modified_base 10: mod_base = OTHER; note = 5'-methyluridine-3'-phosphate
  modified_base 12: mod_base = OTHER; note = 5'-methyluridine-3'-phosphate
  modified_base 13: mod_base = OTHER; note = 5'-methyluridine-3'-phosphate
  modified_base 17: mod_base = OTHER; note = 5'-methyluridine-3'-phosphate
  modified_base 20: mod_base = OTHER; note = 5'-methyluridine-3'-phosphate
  modified_base 23: mod_base = OTHER; note = 5'-methyluridine
atcagatgatcttgcctcctcat

SEQ ID NO: 1655 - RNA, 23 nt, synthetic construct
  source 1..23: mol_type = other RNA
  modified_base 1: mod_base = OTHER; note = 5'-methyluridine-3'-phosphate
  modified_base 4: mod_base = OTHER; note = 5'-methyluridine-3'-phosphate
  modified_base 6: mod_base = OTHER; note = 5'-methyluridine-3'-phosphate
  modified_base 7: mod_base = OTHER; note = 5'-methyluridine-3'-phosphate
  modified_base 11: mod_base = OTHER; note = 5'-methyluridine-3'-phosphate
  modified_base 14: mod_base = OTHER; note = 5'-methyluridine-3'-phosphate
  modified_base 17: mod_base = OTHER; note = 5'-methyluridine-3'-phosphate
  modified_base 18: mod_base = OTHER; note = 5'-methyluridine-3'-phosphate
  modified_base 19: mod_base = OTHER; note = 5'-methyluridine-3'-phosphate
  modified_base 20: mod_base = OTHER; note = 5'-methyluridine-3'-phosphate
  modified_base 23: mod_base = OTHER; note = 5'-methyluridine
tgatcttgcctcctcattttgat

SEQ ID NO: 1656 - RNA, 23 nt, synthetic construct
  source 1..23: mol_type = other RNA
  modified_base 1: mod_base = OTHER; note = 5'-methyluridine-3'-phosphate
  modified_base 5: mod_base = OTHER; note = 5'-methyluridine-3'-phosphate
  modified_base 8: mod_base = OTHER; note = 5'-methyluridine-3'-phosphate
  modified_base 11: mod_base = OTHER; note = 5'-methyluridine-3'-phosphate
  modified_base 12: mod_base = OTHER; note = 5'-methyluridine-3'-phosphate
  modified_base 13: mod_base = OTHER; note = 5'-methyluridine-3'-phosphate
  modified_base 14: mod_base = OTHER; note = 5'-methyluridine-3'-phosphate
  modified_base 17: mod_base = OTHER; note = 5'-methyluridine-3'-phosphate
  modified_base 21: mod_base = OTHER; note = 5'-methyluridine-3'-phosphate
tgcctcctcattttgataaatcc

SEQ ID NO: 1657 - RNA, 23 nt, synthetic construct
  source 1..23: mol_type = other RNA
  modified_base 2: mod_base = OTHER; note = 5'-methyluridine-3'-phosphate
  modified_base 5: mod_base = OTHER; note = 5'-methyluridine-3'-phosphate
  modified_base 6: mod_base = OTHER; note = 5'-methyluridine-3'-phosphate
  modified_base 7: mod_base = OTHER; note = 5'-methyluridine-3'-phosphate
  modified_base 8: mod_base = OTHER; note = 5'-methyluridine-3'-phosphate
  modified_base 11: mod_base = OTHER; note = 5'-methyluridine-3'-phosphate
  modified_base 15: mod_base = OTHER; note = 5'-methyluridine-3'-phosphate
ctcattttgataaatccaagaaa

SEQ ID NO: 1658 - RNA, 23 nt, synthetic construct
  source 1..23: mol_type = other RNA
  modified_base 2: mod_base = OTHER; note = 5'-methyluridine-3'-phosphate
  modified_base 6: mod_base = OTHER; note = 5'-methyluridine-3'-phosphate
  modified_base 15: mod_base = OTHER; note = 5'-methyluridine-3'-phosphate
  modified_base 17: mod_base = OTHER; note = 5'-methyluridine-3'-phosphate
  modified_base 20: mod_base = OTHER; note = 5'-methyluridine-3'-phosphate
  modified_base 22: mod_base = OTHER; note = 5'-methyluridine-3'-phosphate
ataaatccaagaaatatcctcta

SEQ ID NO: 1659 - RNA, 23 nt, synthetic construct
  source 1..23: mol_type = other RNA
  modified_base 9: mod_base = OTHER; note = 5'-methyluridine-3'-phosphate
  modified_base 11: mod_base = OTHER; note = 5'-methyluridine-3'-phosphate
  modified_base 14: mod_base = OTHER; note = 5'-methyluridine-3'-phosphate
  modified_base 16: mod_base = OTHER; note = 5'-methyluridine-3'-phosphate
  modified_base 19: mod_base = OTHER; note = 5'-methyluridine-3'-phosphate
  modified_base 21: mod_base = OTHER; note = 5'-methyluridine-3'-phosphate
  modified_base 22: mod_base = OTHER; note = 5'-methyluridine-3'-phosphate
ccaagaaatatcctctactatta

SEQ ID NO: 1660 - RNA, 23 nt, synthetic construct
  source 1..23: mol_type = other RNA
  modified_base 1: mod_base = OTHER; note = 5'-methyluridine-3'-phosphate
  modified_base 4: mod_base = OTHER; note = 5'-methyluridine-3'-phosphate
  modified_base 6: mod_base = OTHER; note = 5'-methyluridine-3'-phosphate
  modified_base 9: mod_base = OTHER; note = 5'-methyluridine-3'-phosphate
  modified_base 11: mod_base = OTHER; note = 5'-methyluridine-3'-phosphate
  modified_base 12: mod_base = OTHER; note = 5'-methyluridine-3'-phosphate
  modified_base 16: mod_base = OTHER; note = 5'-methyluridine-3'-phosphate
  modified_base 18: mod_base = OTHER; note = 5'-methyluridine-3'-phosphate
  modified_base 20: mod_base = OTHER; note = 5'-methyluridine-3'-phosphate
  modified_base 22: mod_base = OTHER; note = 5'-methyluridine-3'-phosphate
tcctctactattagatgtgtatg

SEQ ID NO: 1661 - RNA, 23 nt, synthetic construct
  source 1..23: mol_type = other RNA
  modified_base 9: mod_base = OTHER; note = 5'-methyluridine-3'-phosphate
  modified_base 11: mod_base = OTHER; note = 5'-methyluridine-3'-phosphate
  modified_base 13: mod_base = OTHER; note = 5'-methyluridine-3'-phosphate
  modified_base 14: mod_base = OTHER; note = 5'-methyluridine-3'-phosphate
  modified_base 20: mod_base = OTHER; note = 5'-methyluridine-3'-phosphate
gcagacactgtcttcagactgaa

SEQ ID NO: 1662 - RNA, 23 nt, synthetic construct
  source 1..23: mol_type = other RNA
  modified_base 3: mod_base = OTHER; note = 5'-methyluridine-3'-phosphate
  modified_base 5: mod_base = OTHER; note = 5'-methyluridine-3'-phosphate
  modified_base 7: mod_base = OTHER; note = 5'-methyluridine-3'-phosphate
  modified_base 8: mod_base = OTHER; note = 5'-methyluridine-3'-phosphate
  modified_base 14: mod_base = OTHER; note = 5'-methyluridine-3'-phosphate
  modified_base 19: mod_base = OTHER; note = 5'-methyluridine-3'-phosphate
actgtcttcagactgaactgggc

SEQ ID NO: 1663 - RNA, 23 nt, synthetic construct
  source 1..23: mol_type = other RNA
  modified_base 1: mod_base = OTHER; note = 5'-methyluridine-3'-phosphate
  modified_base 7: mod_base = OTHER; note = 5'-methyluridine-3'-phosphate
  modified_base 12: mod_base = OTHER; note = 5'-methyluridine-3'-phosphate
  modified_base 20: mod_base = OTHER; note = 5'-methyluridine-3'-phosphate
  modified_base 21: mod_base = OTHER; note = 5'-methyluridine-3'-phosphate
tcagactgaactgggccacttac

SEQ ID NO: 1664 - RNA, 23 nt, synthetic construct
  source 1..23: mol_type = other RNA
  modified_base 7: mod_base = OTHER; note = 5'-methyluridine-3'-phosphate
  modified_base 8: mod_base = OTHER; note = 5'-methyluridine-3'-phosphate
  modified_base 12: mod_base = OTHER; note = 5'-methyluridine-3'-phosphate
  modified_base 13: mod_base = OTHER; note = 5'-methyluridine-3'-phosphate
ggccacttaccttgcaagcacag

SEQ ID NO: 1665 - RNA, 23 nt, synthetic construct
  source 1..23: mol_type = other RNA
  modified_base 3: mod_base = OTHER; note = 5'-methyluridine-3'-phosphate
  modified_base 4: mod_base = OTHER; note = 5'-methyluridine-3'-phosphate
  modified_base 21: mod_base = OTHER; note = 5'-methyluridine-3'-phosphate
  modified_base 22: mod_base = OTHER; note = 5'-methyluridine-3'-phosphate
ccttgcaagcacagaaaacatta

SEQ ID NO: 1666 - RNA, 23 nt, synthetic construct
  source 1..23: mol_type = other RNA
  modified_base 14: mod_base = OTHER; note = 5'-methyluridine-3'-phosphate
  modified_base 15: mod_base = OTHER; note = 5'-methyluridine-3'-phosphate
  modified_base 17: mod_base = OTHER; note = 5'-methyluridine-3'-phosphate
  modified_base 20: mod_base = OTHER; note = 5'-methyluridine-3'-phosphate
agcacagaaaacattatagtagc

SEQ ID NO: 1667 - RNA, 23 nt, synthetic construct
  source 1..23: mol_type = other RNA
  modified_base 6: mod_base = OTHER; note = 5'-methyluridine-3'-phosphate
  modified_base 7: mod_base = OTHER; note = 5'-methyluridine-3'-phosphate
  modified_base 9: mod_base = OTHER; note = 5'-methyluridine-3'-phosphate
  modified_base 12: mod_base = OTHER; note = 5'-methyluridine-3'-phosphate
  modified_base 16: mod_base = OTHER; note = 5'-methyluridine-3'-phosphate
  modified_base 20: mod_base = OTHER; note = 5'-methyluridine-3'-phosphate
  modified_base 21: mod_base = OTHER; note = 5'-methyluridine-3'-phosphate
  modified_base 22: mod_base = OTHER; note = 5'-methyluridine-3'-phosphate
aaacattatagtagctagctttg

SEQ ID NO: 1668 - RNA, 23 nt, synthetic construct
  source 1..23: mol_type = other RNA
  modified_base 1: mod_base = OTHER; note = 5'-methyluridine-3'-phosphate
  modified_base 4: mod_base = OTHER; note = 5'-methyluridine-3'-phosphate
  modified_base 8: mod_base = OTHER; note = 5'-methyluridine-3'-phosphate
  modified_base 12: mod_base = OTHER; note = 5'-methyluridine-3'-phosphate
  modified_base 13: mod_base = OTHER; note = 5'-methyluridine-3'-phosphate
  modified_base 14: mod_base = OTHER; note = 5'-methyluridine-3'-phosphate
  modified_base 17: mod_base = OTHER; note = 5'-methyluridine-3'-phosphate
tagtagctagctttgatggcaga

SEQ ID NO: 1669 - RNA, 23 nt, synthetic construct
  source 1..23: mol_type = other RNA
  modified_base 1: mod_base = OTHER; note = 5'-methyluridine-3'-phosphate
  modified_base 5: mod_base = OTHER; note = 5'-methyluridine-3'-phosphate
  modified_base 6: mod_base = OTHER; note = 5'-methyluridine-3'-phosphate
  modified_base 7: mod_base = OTHER; note = 5'-methyluridine-3'-phosphate
  modified_base 10: mod_base = OTHER; note = 5'-methyluridine-3'-phosphate
  modified_base 22: mod_base = OTHER; note = 5'-methyluridine-3'-phosphate
tagctttgatggcagaggaagtg

SEQ ID NO: 1670 - RNA, 23 nt, synthetic construct
  source 1..23: mol_type = other RNA
  modified_base 1: mod_base = OTHER; note = 5'-methyluridine-3'-phosphate
  modified_base 13: mod_base = OTHER; note = 5'-methyluridine-3'-phosphate
  modified_base 16: mod_base = OTHER; note = 5'-methyluridine-3'-phosphate
  modified_base 17: mod_base = OTHER; note = 5'-methyluridine-3'-phosphate
tggcagaggaagtggttaccaag

SEQ ID NO: 1671 - RNA, 23 nt, synthetic construct
  source 1..23: mol_type = other RNA
  modified_base 2: mod_base = OTHER; note = 5'-methyluridine-3'-phosphate
  modified_base 5: mod_base = OTHER; note = 5'-methyluridine-3'-phosphate
  modified_base 6: mod_base = OTHER; note = 5'-methyluridine-3'-phosphate
  modified_base 17: mod_base = OTHER; note = 5'-methyluridine-3'-phosphate
  modified_base 22: mod_base = OTHER; note = 5'-methyluridine-3'-phosphate
gtggttaccaaggagataagatc

SEQ ID NO: 1672 - RNA, 23 nt, synthetic construct
  source 1..23: mol_type = other RNA
  modified_base 10: mod_base = OTHER; note = 5'-methyluridine-3'-phosphate
  modified_base 15: mod_base = OTHER; note = 5'-methyluridine-3'-phosphate
  modified_base 18: mod_base = OTHER; note = 5'-methyluridine-3'-phosphate
  modified_base 22: mod_base = OTHER; note = 5'-methyluridine-3'-phosphate
ccaaggagataagatcatgcatg

SEQ ID NO: 1673 - RNA, 23 nt, synthetic construct
  source 1..23: mol_type = other RNA
  modified_base 2: mod_base = OTHER; note = 5'-methyluridine-3'-phosphate
  modified_base 7: mod_base = OTHER; note = 5'-methyluridine-3'-phosphate
  modified_base 10: mod_base = OTHER; note = 5'-methyluridine-3'-phosphate
  modified_base 14: mod_base = OTHER; note = 5'-methyluridine-3'-phosphate
  modified_base 19: mod_base = OTHER; note = 5'-methyluridine-3'-phosphate
ataagatcatgcatgcaatcaac

SEQ ID NO: 1674 - RNA, 23 nt, synthetic construct
  source 1..23: mol_type = other RNA
  modified_base 1: mod_base = OTHER; note = 5'-methyluridine-3'-phosphate
  modified_base 5: mod_base = OTHER; note = 5'-methyluridine-3'-phosphate
  modified_base 10: mod_base = OTHER; note = 5'-methyluridine-3'-phosphate
  modified_base 22: mod_base = OTHER; note = 5'-methyluridine-3'-phosphate
tgcatgcaatcaacagaagactg

SEQ ID NO: 1675 - RNA, 23 nt, synthetic construct
  source 1..23: mol_type = other RNA
  modified_base 12: mod_base = OTHER; note = 5'-methyluridine-3'-phosphate
  modified_base 20: mod_base = OTHER; note = 5'-methyluridine-3'-phosphate
  modified_base 21: mod_base = OTHER; note = 5'-methyluridine-3'-phosphate
  modified_base 22: mod_base = OTHER; note = 5'-methyluridine-3'-phosphate
caacagaagactgggaacatttg

SEQ ID NO: 1676 - RNA, 23 nt, synthetic construct
  source 1..23: mol_type = other RNA
  modified_base 5: mod_base = OTHER; note = 5'-methyluridine-3'-phosphate
  modified_base 13: mod_base = OTHER; note = 5'-methyluridine-3'-phosphate
  modified_base 14: mod_base = OTHER; note = 5'-methyluridine-3'-phosphate
  modified_base 15: mod_base = OTHER; note = 5'-methyluridine-3'-phosphate
  modified_base 20: mod_base = OTHER; note = 5'-methyluridine-3'-phosphate
  modified_base 21: mod_base = OTHER; note = 5'-methyluridine-3'-phosphate
agactgggaacatttgaagttga

SEQ ID NO: 1677 - RNA, 23 nt, synthetic construct
  source 1..23: mol_type = other RNA
  modified_base 7: mod_base = OTHER; note = 5'-methyluridine-3'-phosphate
  modified_base 8: mod_base = OTHER; note = 5'-methyluridine-3'-phosphate
  modified_base 9: mod_base = OTHER; note = 5'-methyluridine-3'-phosphate
  modified_base 14: mod_base = OTHER; note = 5'-methyluridine-3'-phosphate
  modified_base 15: mod_base = OTHER; note = 5'-methyluridine-3'-phosphate
  modified_base 21: mod_base = OTHER; note = 5'-methyluridine-3'-phosphate
ggaacatttgaagttgaagatca

SEQ ID NO: 1678 - RNA, 23 nt, synthetic construct
  source 1..23: mol_type = other RNA
  modified_base 1: mod_base = OTHER; note = 5'-methyluridine-3'-phosphate
  modified_base 2: mod_base = OTHER; note = 5'-methyluridine-3'-phosphate
  modified_base 3: mod_base = OTHER; note = 5'-methyluridine-3'-phosphate
  modified_base 8: mod_base = OTHER; note = 5'-methyluridine-3'-phosphate
  modified_base 9: mod_base = OTHER; note = 5'-methyluridine-3'-phosphate
  modified_base 15: mod_base = OTHER; note = 5'-methyluridine-3'-phosphate
  modified_base 20: mod_base = OTHER; note = 5'-methyluridine-3'-phosphate
  modified_base 21: mod_base = OTHER; note = 5'-methyluridine-3'-phosphate
tttgaagttgaagatcaaattga

SEQ ID NO: 1679 - RNA, 23 nt, synthetic construct
  source 1..23: mol_type = other RNA
  modified_base 2: mod_base = OTHER; note = 5'-methyluridine-3'-phosphate
  modified_base 3: mod_base = OTHER; note = 5'-methyluridine-3'-phosphate
  modified_base 9: mod_base = OTHER; note = 5'-methyluridine-3'-phosphate
  modified_base 14: mod_base = OTHER; note = 5'-methyluridine-3'-phosphate
  modified_base 15: mod_base = OTHER; note = 5'-methyluridine-3'-phosphate
gttgaagatcaaattgaagcagc

SEQ ID NO: 1680 - RNA, 23 nt, synthetic construct
  source 1..23: mol_type = other RNA
  modified_base 1: mod_base = OTHER; note = 5'-methyluridine-3'-phosphate
  modified_base 6: mod_base = OTHER; note = 5'-methyluridine-3'-phosphate
  modified_base 7: mod_base = OTHER; note = 5'-methyluridine-3'-phosphate
  modified_base 23: mod_base = OTHER; note = 5'-methyluridine
tcaaattgaagcagccagacaat

SEQ ID NO: 1681 - RNA, 23 nt, synthetic construct
  source 1..23: mol_type = other RNA
  modified_base 15: mod_base = OTHER; note = 5'-methyluridine-3'-phosphate
  modified_base 16: mod_base = OTHER; note = 5'-methyluridine-3'-phosphate
  modified_base 17: mod_base = OTHER; note = 5'-methyluridine-3'-phosphate
  modified_base 18: mod_base = OTHER; note = 5'-methyluridine-3'-phosphate
aagcagccagacaattttcaaaa

SEQ ID NO: 1682 - RNA, 23 nt, synthetic construct
  source 1..23: mol_type = other RNA
  modified_base 2: mod_base = OTHER; note = 5'-methyluridine-3'-phosphate
  modified_base 7: mod_base = OTHER; note = 5'-methyluridine-3'-phosphate
  modified_base 8: mod_base = OTHER; note = 5'-methyluridine-3'-phosphate
  modified_base 9: mod_base = OTHER; note = 5'-methyluridine-3'-phosphate
  modified_base 11: mod_base = OTHER; note = 5'-methyluridine-3'-phosphate
atgggatttgtggacaacaaacg

SEQ ID NO: 1683 - RNA, 23 nt, synthetic construct
  source 1..23: mol_type = other RNA
  modified_base 1: mod_base = OTHER; note = 5'-methyluridine-3'-phosphate
  modified_base 2: mod_base = OTHER; note = 5'-methyluridine-3'-phosphate
  modified_base 3: mod_base = OTHER; note = 5'-methyluridine-3'-phosphate
  modified_base 5: mod_base = OTHER; note = 5'-methyluridine-3'-phosphate
  modified_base 20: mod_base = OTHER; note = 5'-methyluridine-3'-phosphate
  modified_base 21: mod_base = OTHER; note = 5'-methyluridine-3'-phosphate
tttgtggacaacaaacgaattgc

SEQ ID NO: 1684 - RNA, 23 nt, synthetic construct
  source 1..23: mol_type = other RNA
  modified_base 13: mod_base = OTHER; note = 5'-methyluridine-3'-phosphate
  modified_base 14: mod_base = OTHER; note = 5'-methyluridine-3'-phosphate
  modified_base 19: mod_base = OTHER; note = 5'-methyluridine-3'-phosphate
  modified_base 20: mod_base = OTHER; note = 5'-methyluridine-3'-phosphate
  modified_base 21: mod_base = OTHER; note = 5'-methyluridine-3'-phosphate
acaacaaacgaattgcaatttgg

SEQ ID NO: 1685 - RNA, 23 nt, synthetic construct
  source 1..23: mol_type = other RNA
  modified_base 2: mod_base = OTHER; note = 5'-methyluridine-3'-phosphate
  modified_base 5: mod_base = OTHER; note = 5'-methyluridine-3'-phosphate
  modified_base 8: mod_base = OTHER; note = 5'-methyluridine-3'-phosphate
  modified_base 10: mod_base = OTHER; note = 5'-methyluridine-3'-phosphate
  modified_base 17: mod_base = OTHER; note = 5'-methyluridine-3'-phosphate
  modified_base 21: mod_base = OTHER; note = 5'-methyluridine-3'-phosphate
ctggtcatatggagggtacgtaa

SEQ ID NO: 1686 - RNA, 23 nt, synthetic construct
  source 1..23: mol_type = other RNA
  modified_base 6: mod_base = OTHER; note = 5'-methyluridine-3'-phosphate
  modified_base 10: mod_base = OTHER; note = 5'-methyluridine-3'-phosphate
  modified_base 15: mod_base = OTHER; note = 5'-methyluridine-3'-phosphate
  modified_base 19: mod_base = OTHER; note = 5'-methyluridine-3'-phosphate
  modified_base 22: mod_base = OTHER; note = 5'-methyluridine-3'-phosphate
gagggtacgtaacctcaatggtc

SEQ ID NO: 1687 - RNA, 23 nt, synthetic construct
  source 1..23: mol_type = other RNA
  modified_base 4: mod_base = OTHER; note = 5'-methyluridine-3'-phosphate
  modified_base 12: mod_base = OTHER; note = 5'-methyluridine-3'-phosphate
  modified_base 17: mod_base = OTHER; note = 5'-methyluridine-3'-phosphate
  modified_base 19: mod_base = OTHER; note = 5'-methyluridine-3'-phosphate
  modified_base 20: mod_base = OTHER; note = 5'-methyluridine-3'-phosphate
ggatcgggaagtggcgtgttcaa

SEQ ID NO: 1688 - RNA, 23 nt, synthetic construct
  source 1..23: mol_type = other RNA
  modified_base 3: mod_base = OTHER; note = 5'-methyluridine-3'-phosphate
  modified_base 8: mod_base = OTHER; note = 5'-methyluridine-3'-phosphate
  modified_base 10: mod_base = OTHER; note = 5'-methyluridine-3'-phosphate
  modified_base 11: mod_base = OTHER; note = 5'-methyluridine-3'-phosphate
  modified_base 16: mod_base = OTHER; note = 5'-methyluridine-3'-phosphate
  modified_base 18: mod_base = OTHER; note = 5'-methyluridine-3'-phosphate
  modified_base 23: mod_base = OTHER; note = 5'-methyluridine
agtggcgtgttcaagtgtggaat

SEQ ID NO: 1689 - RNA, 23 nt, synthetic construct
  source 1..23: mol_type = other RNA
  modified_base 1: mod_base = OTHER; note = 5'-methyluridine-3'-phosphate
  modified_base 3: mod_base = OTHER; note = 5'-methyluridine-3'-phosphate
  modified_base 4: mod_base = OTHER; note = 5'-methyluridine-3'-phosphate
  modified_base 9: mod_base = OTHER; note = 5'-methyluridine-3'-phosphate
  modified_base 11: mod_base = OTHER; note = 5'-methyluridine-3'-phosphate
  modified_base 16: mod_base = OTHER; note = 5'-methyluridine-3'-phosphate
  modified_base 22: mod_base = OTHER; note = 5'-methyluridine-3'-phosphate
tgttcaagtgtggaatagccgtg

SEQ ID NO: 1690 - RNA, 23 nt, synthetic construct
  source 1..23: mol_type = other RNA
  modified_base 3: mod_base = OTHER; note = 5'-methyluridine-3'-phosphate
  modified_base 9: mod_base = OTHER; note = 5'-methyluridine-3'-phosphate
  modified_base 12: mod_base = OTHER; note = 5'-methyluridine-3'-phosphate
  modified_base 14: mod_base = OTHER; note = 5'-methyluridine-3'-phosphate
  modified_base 18: mod_base = OTHER; note = 5'-methyluridine-3'-phosphate
  modified_base 22: mod_base = OTHER; note = 5'-methyluridine-3'-phosphate
ggtgggagtactatgactcagtg

SEQ ID NO: 1691 - RNA, 23 nt, synthetic construct
  source 1..23: mol_type = other RNA
  modified_base 2: mod_base = OTHER; note = 5'-methyluridine-3'-phosphate
  modified_base 4: mod_base = OTHER; note = 5'-methyluridine-3'-phosphate
  modified_base 8: mod_base = OTHER; note = 5'-methyluridine-3'-phosphate
  modified_base 12: mod_base = OTHER; note = 5'-methyluridine-3'-phosphate
  modified_base 14: mod_base = OTHER; note = 5'-methyluridine-3'-phosphate
ctatgactcagtgtacacagaac

SEQ ID NO: 1692 - RNA, 23 nt, synthetic construct
  source 1..23: mol_type = other RNA
  modified_base 4: mod_base = OTHER; note = 5'-methyluridine-3'-phosphate
  modified_base 6: mod_base = OTHER; note = 5'-methyluridine-3'-phosphate
  modified_base 17: mod_base = OTHER; note = 5'-methyluridine-3'-phosphate
  modified_base 18: mod_base = OTHER; note = 5'-methyluridine-3'-phosphate
  modified_base 22: mod_base = OTHER; note = 5'-methyluridine-3'-phosphate
cagtgtacacagaacgttacatg

SEQ ID NO: 1693 - RNA, 23 nt, synthetic construct
  source 1..23: mol_type = other RNA
  modified_base 11: mod_base = OTHER; note = 5'-methyluridine-3'-phosphate
  modified_base 12: mod_base = OTHER; note = 5'-methyluridine-3'-phosphate
  modified_base 16: mod_base = OTHER; note = 5'-methyluridine-3'-phosphate
  modified_base 20: mod_base = OTHER; note = 5'-methyluridine-3'-phosphate
  modified_base 22: mod_base = OTHER; note = 5'-methyluridine-3'-phosphate
acacagaacgttacatgggtctc

SEQ ID NO: 1694 - RNA, 23 nt, synthetic construct
  source 1..23: mol_type = other RNA
  modified_base 4: mod_base = OTHER; note = 5'-methyluridine-3'-phosphate
  modified_base 5: mod_base = OTHER; note = 5'-methyluridine-3'-phosphate
  modified_base 9: mod_base = OTHER; note = 5'-methyluridine-3'-phosphate
  modified_base 13: mod_base = OTHER; note = 5'-methyluridine-3'-phosphate
  modified_base 15: mod_base = OTHER; note = 5'-methyluridine-3'-phosphate
  modified_base 22: mod_base = OTHER; note = 5'-methyluridine-3'-phosphate
acgttacatgggtctcccaactc

SEQ ID NO: 1695 - RNA, 23 nt, synthetic construct
  source 1..23: mol_type = other RNA
  modified_base 1: mod_base = OTHER; note = 5'-methyluridine-3'-phosphate
  modified_base 5: mod_base = OTHER; note = 5'-methyluridine-3'-phosphate
  modified_base 7: mod_base = OTHER; note = 5'-methyluridine-3'-phosphate
  modified_base 14: mod_base = OTHER; note = 5'-methyluridine-3'-phosphate
tgggtctcccaactccagaagac

SEQ ID NO: 1696 - RNA, 23 nt, synthetic construct
  source 1..23: mol_type = other RNA
  modified_base 7: mod_base = OTHER; note = 5'-methyluridine-3'-phosphate
  modified_base 21: mod_base = OTHER; note = 5'-methyluridine-3'-phosphate
  modified_base 22: mod_base = OTHER; note = 5'-methyluridine-3'-phosphate
cccaactccagaagacaaccttg

SEQ ID NO: 1697 - RNA, 23 nt, synthetic construct
  source 1..23: mol_type = other RNA
  modified_base 10: mod_base = OTHER; note = 5'-methyluridine-3'-phosphate
  modified_base 11: mod_base = OTHER; note = 5'-methyluridine-3'-phosphate
  modified_base 17: mod_base = OTHER; note = 5'-methyluridine-3'-phosphate
  modified_base 18: mod_base = OTHER; note = 5'-methyluridine-3'-phosphate
aagacaaccttgaccattacaga

SEQ ID NO: 1698 - RNA, 23 nt, synthetic construct
  source 1..23: mol_type = other RNA
  modified_base 4: mod_base = OTHER; note = 5'-methyluridine-3'-phosphate
  modified_base 5: mod_base = OTHER; note = 5'-methyluridine-3'-phosphate
  modified_base 11: mod_base = OTHER; note = 5'-methyluridine-3'-phosphate
  modified_base 12: mod_base = OTHER; note = 5'-methyluridine-3'-phosphate
  modified_base 20: mod_base = OTHER; note = 5'-methyluridine-3'-phosphate
  modified_base 21: mod_base = OTHER; note = 5'-methyluridine-3'-phosphate
accttgaccattacagaaattca

SEQ ID NO: 1699 - RNA, 23 nt, synthetic construct
  source 1..23: mol_type = other RNA
  modified_base 4: mod_base = OTHER; note = 5'-methyluridine-3'-phosphate
  modified_base 5: mod_base = OTHER; note = 5'-methyluridine-3'-phosphate
  modified_base 13: mod_base = OTHER; note = 5'-methyluridine-3'-phosphate
  modified_base 14: mod_base = OTHER; note = 5'-methyluridine-3'-phosphate
  modified_base 21: mod_base = OTHER; note = 5'-methyluridine-3'-phosphate
ccattacagaaattcaacagtca

SEQ ID NO: 1700 - RNA, 23 nt, synthetic construct
  source 1..23: mol_type = other RNA
  modified_base 7: mod_base = OTHER; note = 5'-methyluridine-3'-phosphate
  modified_base 8: mod_base = OTHER; note = 5'-methyluridine-3'-phosphate
  modified_base 15: mod_base = OTHER; note = 5'-methyluridine-3'-phosphate
  modified_base 18: mod_base = OTHER; note = 5'-methyluridine-3'-phosphate
cagaaattcaacagtcatgagca

SEQ ID NO: 1701 - RNA, 23 nt, synthetic construct
  source 1..23: mol_type = other RNA
  modified_base 3: mod_base = OTHER; note = 5'-methyluridine-3'-phosphate
  modified_base 6: mod_base = OTHER; note = 5'-methyluridine-3'-phosphate
  modified_base 16: mod_base = OTHER; note = 5'-methyluridine-3'-phosphate
  modified_base 22: mod_base = OTHER; note = 5'-methyluridine-3'-phosphate
  modified_base 23: mod_base = OTHER; note = 5'-methyluridine
agtcatgagcagagctgaaaatt

SEQ ID NO: 1702 - RNA, 23 nt, synthetic construct
  source 1..23: mol_type = other RNA
  modified_base 10: mod_base = OTHER; note = 5'-methyluridine-3'-phosphate
  modified_base 16: mod_base = OTHER; note = 5'-methyluridine-3'-phosphate
  modified_base 17: mod_base = OTHER; note = 5'-methyluridine-3'-phosphate
  modified_base 18: mod_base = OTHER; note = 5'-methyluridine-3'-phosphate
  modified_base 19: mod_base = OTHER; note = 5'-methyluridine-3'-phosphate
gagcagagctgaaaattttaaac

SEQ ID NO: 1703 - RNA, 23 nt, synthetic construct
  source 1..23: mol_type = other RNA
  modified_base 2: mod_base = OTHER; note = 5'-methyluridine-3'-phosphate
  modified_base 3: mod_base = OTHER; note = 5'-methyluridine-3'-phosphate
  modified_base 4: mod_base = OTHER; note = 5'-methyluridine-3'-phosphate
  modified_base 5: mod_base = OTHER; note = 5'-methyluridine-3'-phosphate
  modified_base 13: mod_base = OTHER; note = 5'-methyluridine-3'-phosphate
  modified_base 14: mod_base = OTHER; note = 5'-methyluridine-3'-phosphate
  modified_base 18: mod_base = OTHER; note = 5'-methyluridine-3'-phosphate
  modified_base 22: mod_base = OTHER; note = 5'-methyluridine-3'-phosphate
attttaaacaagttgagtacctc

SEQ ID NO: 1704 - RNA, 23 nt, synthetic construct
  source 1..23: mol_type = other RNA
  modified_base 5: mod_base = OTHER; note = 5'-methyluridine-3'-phosphate
  modified_base 6: mod_base = OTHER; note = 5'-methyluridine-3'-phosphate
  modified_base 10: mod_base = OTHER; note = 5'-methyluridine-3'-phosphate
  modified_base 14: mod_base = OTHER; note = 5'-methyluridine-3'-phosphate
  modified_base 17: mod_base = OTHER; note = 5'-methyluridine-3'-phosphate
  modified_base 18: mod_base = OTHER; note = 5'-methyluridine-3'-phosphate
  modified_base 20: mod_base = OTHER; note = 5'-methyluridine-3'-phosphate
  modified_base 21: mod_base = OTHER; note = 5'-methyluridine-3'-phosphate
caagttgagtacctccttattca

SEQ ID NO: 1705 - RNA, 23 nt, synthetic construct
  source 1..23: mol_type = other RNA
  modified_base 3: mod_base = OTHER; note = 5'-methyluridine-3'-phosphate
  modified_base 7: mod_base = OTHER; note = 5'-methyluridine-3'-phosphate
  modified_base 10: mod_base = OTHER; note = 5'-methyluridine-3'-phosphate
  modified_base 11: mod_base = OTHER; note = 5'-methyluridine-3'-phosphate
  modified_base 13: mod_base = OTHER; note = 5'-methyluridine-3'-phosphate
  modified_base 14: mod_base = OTHER; note = 5'-methyluridine-3'-phosphate
  modified_base 17: mod_base = OTHER; note = 5'-methyluridine-3'-phosphate
agtacctccttattcatggaaca

SEQ ID NO: 1706 - RNA, 23 nt, synthetic construct
  source 1..23: mol_type = other RNA
  modified_base 3: mod_base = OTHER; note = 5'-methyluridine-3'-phosphate
  modified_base 4: mod_base = OTHER; note = 5'-methyluridine-3'-phosphate
  modified_base 6: mod_base = OTHER; note = 5'-methyluridine-3'-phosphate
  modified_base 7: mod_base = OTHER; note = 5'-methyluridine-3'-phosphate
  modified_base 10: mod_base = OTHER; note = 5'-methyluridine-3'-phosphate
  modified_base 22: mod_base = OTHER; note = 5'-methyluridine-3'-phosphate
ccttattcatggaacagcagatg

SEQ ID NO: 1707 - RNA, 23 nt, synthetic construct
  source 1..23: mol_type = other RNA
  modified_base 1: mod_base = OTHER; note = 5'-methyluridine-3'-phosphate
  modified_base 13: mod_base = OTHER; note = 5'-methyluridine-3'-phosphate
  modified_base 16: mod_base = OTHER; note = 5'-methyluridine-3'-phosphate
  modified_base 21: mod_base = OTHER; note = 5'-methyluridine-3'-phosphate
  modified_base 22: mod_base = OTHER; note = 5'-methyluridine-3'-phosphate
tggaacagcagatgataacgttc

SEQ ID NO: 1708 - RNA, 23 nt, synthetic construct
  source 1..23: mol_type = other RNA
  modified_base 7: mod_base = OTHER; note = 5'-methyluridine-3'-phosphate
  modified_base 10: mod_base = OTHER; note = 5'-methyluridine-3'-phosphate
  modified_base 15: mod_base = OTHER; note = 5'-methyluridine-3'-phosphate
  modified_base 16: mod_base = OTHER; note = 5'-methyluridine-3'-phosphate
  modified_base 20: mod_base = OTHER; note = 5'-methyluridine-3'-phosphate
  modified_base 21: mod_base = OTHER; note = 5'-methyluridine-3'-phosphate
  modified_base 22: mod_base = OTHER; note = 5'-methyluridine-3'-phosphate
agcagatgataacgttcactttc

SEQ ID NO: 1709 - RNA, 23 nt, synthetic construct
  source 1..23: mol_type = other RNA
  modified_base 3: mod_base = OTHER; note = 5'-methyluridine-3'-phosphate
  modified_base 8: mod_base = OTHER; note = 5'-methyluridine-3'-phosphate
  modified_base 9: mod_base = OTHER; note = 5'-methyluridine-3'-phosphate
  modified_base 13: mod_base = OTHER; note = 5'-methyluridine-3'-phosphate
  modified_base 14: mod_base = OTHER; note = 5'-methyluridine-3'-phosphate
  modified_base 15: mod_base = OTHER; note = 5'-methyluridine-3'-phosphate
  modified_base 22: mod_base = OTHER; note = 5'-methyluridine-3'-phosphate
gataacgttcactttcagcagtc

SEQ ID NO: 1710 - RNA, 23 nt, synthetic construct
  source 1..23: mol_type = other RNA
  modified_base 2: mod_base = OTHER; note = 5'-methyluridine-3'-phosphate
  modified_base 3: mod_base = OTHER; note = 5'-methyluridine-3'-phosphate
  modified_base 7: mod_base = OTHER; note = 5'-methyluridine-3'-phosphate
  modified_base 8: mod_base = OTHER; note = 5'-methyluridine-3'-phosphate
  modified_base 9: mod_base = OTHER; note = 5'-methyluridine-3'-phosphate
  modified_base 16: mod_base = OTHER; note = 5'-methyluridine-3'-phosphate
  modified_base 21: mod_base = OTHER; note = 5'-methyluridine-3'-phosphate
gttcactttcagcagtcagctca

SEQ ID NO: 1711 - RNA, 23 nt, synthetic construct
  source 1..23: mol_type = other RNA
  modified_base 7: mod_base = OTHER; note = 5'-methyluridine-3'-phosphate
  modified_base 12: mod_base = OTHER; note = 5'-methyluridine-3'-phosphate
  modified_base 17: mod_base = OTHER; note = 5'-methyluridine-3'-phosphate
  modified_base 19: mod_base = OTHER; note = 5'-methyluridine-3'-phosphate
cagcagtcagctcagatctccaa

SEQ ID NO: 1712 - RNA, 23 nt, synthetic construct
  source 1..23: mol_type = other RNA
  modified_base 5: mod_base = OTHER; note = 5'-methyluridine-3'-phosphate
  modified_base 10: mod_base = OTHER; note = 5'-methyluridine-3'-phosphate
  modified_base 12: mod_base = OTHER; note = 5'-methyluridine-3'-phosphate
  modified_base 22: mod_base = OTHER; note = 5'-methyluridine-3'-phosphate
cagctcagatctccaaagccctg

SEQ ID NO: 1713 - RNA, 23 nt, synthetic construct
  source 1..23: mol_type = other RNA
  modified_base 3: mod_base = OTHER; note = 5'-methyluridine-3'-phosphate
  modified_base 5: mod_base = OTHER; note = 5'-methyluridine-3'-phosphate
  modified_base 15: mod_base = OTHER; note = 5'-methyluridine-3'-phosphate
  modified_base 18: mod_base = OTHER; note = 5'-methyluridine-3'-phosphate
  modified_base 22: mod_base = OTHER; note = 5'-methyluridine-3'-phosphate
gatctccaaagccctggtcgatg

SEQ ID NO: 1714 - RNA, 23 nt, synthetic construct
  source 1..23: mol_type = other RNA
  modified_base 7: mod_base = OTHER; note = 5'-methyluridine-3'-phosphate
  modified_base 10: mod_base = OTHER; note = 5'-methyluridine-3'-phosphate
  modified_base 14: mod_base = OTHER; note = 5'-methyluridine-3'-phosphate
  modified_base 16: mod_base = OTHER; note = 5'-methyluridine-3'-phosphate
  modified_base 17: mod_base = OTHER; note = 5'-methyluridine-3'-phosphate
  modified_base 22: mod_base = OTHER; note = 5'-methyluridine-3'-phosphate
aagccctggtcgatgttggagtg

SEQ ID NO: 1715 - RNA, 23 nt, synthetic construct
  source 1..23: mol_type = other RNA
  modified_base 1: mod_base = OTHER; note = 5'-methyluridine-3'-phosphate
  modified_base 4: mod_base = OTHER; note = 5'-methyluridine-3'-phosphate
  modified_base 8: mod_base = OTHER; note = 5'-methyluridine-3'-phosphate
  modified_base 10: mod_base = OTHER; note = 5'-methyluridine-3'-phosphate
  modified_base 11: mod_base = OTHER; note = 5'-methyluridine-3'-phosphate
  modified_base 16: mod_base = OTHER; note = 5'-methyluridine-3'-phosphate
  modified_base 20: mod_base = OTHER; note = 5'-methyluridine-3'-phosphate
  modified_base 21: mod_base = OTHER; note = 5'-methyluridine-3'-phosphate
  modified_base 22: mod_base = OTHER; note = 5'-methyluridine-3'-phosphate
tggtcgatgttggagtggatttc

SEQ ID NO: 1716 - RNA, 23 nt, synthetic construct
  source 1..23: mol_type = other RNA
  modified_base 5: mod_base = OTHER; note = 5'-methyluridine-3'-phosphate
  modified_base 9: mod_base = OTHER; note = 5'-methyluridine-3'-phosphate
  modified_base 10: mod_base = OTHER; note = 5'-methyluridine-3'-phosphate
  modified_base 11: mod_base = OTHER; note = 5'-methyluridine-3'-phosphate
  modified_base 20: mod_base = OTHER; note = 5'-methyluridine-3'-phosphate
  modified_base 22: mod_base = OTHER; note = 5'-methyluridine-3'-phosphate
ggagtggatttccaggcaatgtg

SEQ ID NO: 1717 - RNA, 23 nt, synthetic construct
  source 1..23: mol_type = other RNA
  modified_base 1: mod_base = OTHER; note = 5'-methyluridine-3'-phosphate
  modified_base 2: mod_base = OTHER; note = 5'-methyluridine-3'-phosphate
  modified_base 3: mod_base = OTHER; note = 5'-methyluridine-3'-phosphate
  modified_base 12: mod_base = OTHER; note = 5'-methyluridine-3'-phosphate
  modified_base 14: mod_base = OTHER; note = 5'-methyluridine-3'-phosphate
  modified_base 17: mod_base = OTHER; note = 5'-methyluridine-3'-phosphate
  modified_base 19: mod_base = OTHER; note = 5'-methyluridine-3'-phosphate
  modified_base 22: mod_base = OTHER; note = 5'-methyluridine-3'-phosphate
tttccaggcaatgtggtatactg

SEQ ID NO: 1718 - RNA, 23 nt, synthetic construct
  source 1..23: mol_type = other RNA
  modified_base 5: mod_base = OTHER; note = 5'-methyluridine-3'-phosphate
  modified_base 7: mod_base = OTHER; note = 5'-methyluridine-3'-phosphate
  modified_base 10: mod_base = OTHER; note = 5'-methyluridine-3'-phosphate
  modified_base 12: mod_base = OTHER; note = 5'-methyluridine-3'-phosphate
  modified_base 15: mod_base = OTHER; note = 5'-methyluridine-3'-phosphate
  modified_base 18: mod_base = OTHER; note = 5'-methyluridine-3'-phosphate
gcaatgtggtatactgatgaaga

SEQ ID NO: 1719 - RNA, 23 nt, synthetic construct
  source 1..23: mol_type = other RNA
  modified_base 1: mod_base = OTHER; note = 5'-methyluridine-3'-phosphate
  modified_base 4: mod_base = OTHER; note = 5'-methyluridine-3'-phosphate
  modified_base 6: mod_base = OTHER; note = 5'-methyluridine-3'-phosphate
  modified_base 9: mod_base = OTHER; note = 5'-methyluridine-3'-phosphate
  modified_base 12: mod_base = OTHER; note = 5'-methyluridine-3'-phosphate
  modified_base 21: mod_base = OTHER; note = 5'-methyluridine-3'-phosphate
tggtatactgatgaagaccatgg

SEQ ID NO: 1720 - RNA, 23 nt, synthetic construct
  source 1..23: mol_type = other RNA
  modified_base 1: mod_base = OTHER; note = 5'-methyluridine-3'-phosphate
  modified_base 4: mod_base = OTHER; note = 5'-methyluridine-3'-phosphate
  modified_base 13: mod_base = OTHER; note = 5'-methyluridine-3'-phosphate
  modified_base 18: mod_base = OTHER; note = 5'-methyluridine-3'-phosphate
  modified_base 22: mod_base = OTHER; note = 5'-methyluridine-3'-phosphate
tgatgaagaccatggaatagcta

SEQ ID NO: 1721 - RNA, 23 nt, synthetic construct
  source 1..23: mol_type = other RNA
  modified_base 6: mod_base = OTHER; note = 5'-methyluridine-3'-phosphate
  modified_base 11: mod_base = OTHER; note = 5'-methyluridine-3'-phosphate
  modified_base 15: mod_base = OTHER; note = 5'-methyluridine-3'-phosphate
gaccatggaatagctagcagcac

SEQ ID NO: 1722 - RNA, 23 nt, synthetic construct
  source 1..23: mol_type = other RNA
  modified_base 4: mod_base = OTHER; note = 5'-methyluridine-3'-phosphate
  modified_base 8: mod_base = OTHER; note = 5'-methyluridine-3'-phosphate
gaatagctagcagcacagcacac

SEQ ID NO: 1723 - RNA, 23 nt, synthetic construct
  source 1..23: mol_type = other RNA
  modified_base 21: mod_base = OTHER; note = 5'-methyluridine-3'-phosphate
  modified_base 23: mod_base = OTHER; note = 5'-methyluridine
agcagcacagcacaccaacatat

SEQ ID NO: 1724 - RNA, 23 nt, synthetic construct
  source 1..23: mol_type = other RNA
  modified_base 15: mod_base = OTHER; note = 5'-methyluridine-3'-phosphate
  modified_base 17: mod_base = OTHER; note = 5'-methyluridine-3'-phosphate
  modified_base 19: mod_base = OTHER; note = 5'-methyluridine-3'-phosphate
  modified_base 21: mod_base = OTHER; note = 5'-methyluridine-3'-phosphate
acagcacaccaacatatatatac

SEQ ID NO: 1725 - RNA, 23 nt, synthetic construct
  source 1..23: mol_type = other RNA
  modified_base 9: mod_base = OTHER; note = 5'-methyluridine-3'-phosphate
  modified_base 11: mod_base = OTHER; note = 5'-methyluridine-3'-phosphate
  modified_base 13: mod_base = OTHER; note = 5'-methyluridine-3'-phosphate
  modified_base 15: mod_base = OTHER; note = 5'-methyluridine-3'-phosphate
  modified_base 23: mod_base = OTHER; note = 5'-methyluridine
caccaacatatatatacccacat

SEQ ID NO: 1726 - RNA, 23 nt, synthetic construct
  source 1..23: mol_type = other RNA
  modified_base 1: mod_base = OTHER; note = 5'-methyluridine-3'-phosphate
  modified_base 3: mod_base = OTHER; note = 5'-methyluridine-3'-phosphate
  modified_base 11: mod_base = OTHER; note = 5'-methyluridine-3'-phosphate
  modified_base 19: mod_base = OTHER; note = 5'-methyluridine-3'-phosphate
  modified_base 20: mod_base = OTHER; note = 5'-methyluridine-3'-phosphate
  modified_base 23: mod_base = OTHER; note = 5'-methyluridine
tatacccacatgagccacttcat

SEQ ID NO: 1727 - RNA, 23 nt, synthetic construct
  source 1..23: mol_type = other RNA
  modified_base 5: mod_base = OTHER; note = 5'-methyluridine-3'-phosphate
  modified_base 13: mod_base = OTHER; note = 5'-methyluridine-3'-phosphate
  modified_base 14: mod_base = OTHER; note = 5'-methyluridine-3'-phosphate
  modified_base 17: mod_base = OTHER; note = 5'-methyluridine-3'-phosphate
cacatgagccacttcataaaaca

SEQ ID NO: 1728 - RNA, 23 nt, synthetic construct
  source 1..23: mol_type = other RNA
  modified_base 7: mod_base = OTHER; note = 5'-methyluridine-3'-phosphate
  modified_base 8: mod_base = OTHER; note = 5'-methyluridine-3'-phosphate
  modified_base 11: mod_base = OTHER; note = 5'-methyluridine-3'-phosphate
  modified_base 19: mod_base = OTHER; note = 5'-methyluridine-3'-phosphate
  modified_base 21: mod_base = OTHER; note = 5'-methyluridine-3'-phosphate
  modified_base 22: mod_base = OTHER; note = 5'-methyluridine-3'-phosphate
  modified_base 23: mod_base = OTHER; note = 5'-methyluridine
agccacttcataaaacaatgttt

SEQ ID NO: 1729 - RNA, 23 nt, synthetic construct
  source 1..23: mol_type = other RNA
  modified_base 8: mod_base = OTHER; note = 5'-methyluridine-3'-phosphate
  modified_base 10: mod_base = OTHER; note = 5'-methyluridine-3'-phosphate
  modified_base 11: mod_base = OTHER; note = 5'-methyluridine-3'-phosphate
  modified_base 12: mod_base = OTHER; note = 5'-methyluridine-3'-phosphate
  modified_base 14: mod_base = OTHER; note = 5'-methyluridine-3'-phosphate
  modified_base 16: mod_base = OTHER; note = 5'-methyluridine-3'-phosphate
  modified_base 17: mod_base = OTHER; note = 5'-methyluridine-3'-phosphate
  modified_base 18: mod_base = OTHER; note = 5'-methyluridine-3'-phosphate
  modified_base 22: mod_base = OTHER; note = 5'-methyluridine-3'-phosphate
  modified_base 23: mod_base = OTHER; note = 5'-methyluridine
aaaacaatgtttctctttacctt

SEQ ID NO: 1730 - RNA, 23 nt, synthetic construct
  source 1..23: mol_type = other RNA
  modified_base 2: mod_base = OTHER; note = 5'-methyluridine-3'-phosphate
  modified_base 4: mod_base = OTHER; note = 5'-methyluridine-3'-phosphate
  modified_base 5: mod_base = OTHER; note = 5'-methyluridine-3'-phosphate
  modified_base 6: mod_base = OTHER; note = 5'-methyluridine-3'-phosphate
  modified_base 8: mod_base = OTHER; note = 5'-methyluridine-3'-phosphate
  modified_base 10: mod_base = OTHER; note = 5'-methyluridine-3'-phosphate
  modified_base 11: mod_base = OTHER; note = 5'-methyluridine-3'-phosphate
  modified_base 12: mod_base = OTHER; note = 5'-methyluridine-3'-phosphate
  modified_base 16: mod_base = OTHER; note = 5'-methyluridine-3'-phosphate
  modified_base 17: mod_base = OTHER; note = 5'-methyluridine-3'-phosphate
atgtttctctttaccttagcacc

SEQ ID NO: 1731 - RNA, 23 nt, synthetic construct
  source 1..23: mol_type = other RNA
  modified_base 1: mod_base = OTHER; note = 5'-methyluridine-3'-phosphate
  modified_base 3: mod_base = OTHER; note = 5'-methyluridine-3'-phosphate
  modified_base 4: mod_base = OTHER; note = 5'-methyluridine-3'-phosphate
  modified_base 5: mod_base = OTHER; note = 5'-methyluridine-3'-phosphate
  modified_base 9: mod_base = OTHER; note = 5'-methyluridine-3'-phosphate
  modified_base 10: mod_base = OTHER; note = 5'-methyluridine-3'-phosphate
  modified_base 17: mod_base = OTHER; note = 5'-methyluridine-3'-phosphate
  modified_base 23: mod_base = OTHER; note = 5'-methyluridine
tctttaccttagcacctcaaaat

SEQ ID NO: 1732 - RNA, 23 nt, synthetic construct
  source 1..23: mol_type = other RNA
  modified_base 3: mod_base = OTHER; note = 5'-methyluridine-3'-phosphate
  modified_base 4: mod_base = OTHER; note = 5'-methyluridine-3'-phosphate
  modified_base 11: mod_base = OTHER; note = 5'-methyluridine-3'-phosphate
  modified_base 17: mod_base = OTHER; note = 5'-methyluridine-3'-phosphate
  modified_base 22: mod_base = OTHER; note = 5'-methyluridine-3'-phosphate
ccttagcacctcaaaataccatg

SEQ ID NO: 1733 - RNA, 23 nt, synthetic construct
  source 1..23: mol_type = other RNA
  modified_base 4: mod_base = OTHER; note = 5'-methyluridine-3'-phosphate
  modified_base 10: mod_base = OTHER; note = 5'-methyluridine-3'-phosphate
  modified_base 15: mod_base = OTHER; note = 5'-methyluridine-3'-phosphate
  modified_base 20: mod_base = OTHER; note = 5'-methyluridine-3'-phosphate
  modified_base 21: mod_base = OTHER; note = 5'-methyluridine-3'-phosphate
  modified_base 22: mod_base = OTHER; note = 5'-methyluridine-3'-phosphate
acctcaaaataccatgccattta

SEQ ID NO: 1734 - RNA, 23 nt, synthetic construct
  source 1..23: mol_type = other RNA
  modified_base 3: mod_base = OTHER; note = 5'-methyluridine-3'-phosphate
  modified_base 8: mod_base = OTHER; note = 5'-methyluridine-3'-phosphate
  modified_base 13: mod_base = OTHER; note = 5'-methyluridine-3'-phosphate
  modified_base 14: mod_base = OTHER; note = 5'-methyluridine-3'-phosphate
  modified_base 15: mod_base = OTHER; note = 5'-methyluridine-3'-phosphate
  modified_base 21: mod_base = OTHER; note = 5'-methyluridine-3'-phosphate
  modified_base 22: mod_base = OTHER; note = 5'-methyluridine-3'-phosphate
aataccatgccatttaaagctta

SEQ ID NO: 1735 - RNA, 23 nt, synthetic construct
  source 1..23: mol_type = other RNA
  modified_base 1: mod_base = OTHER; note = 5'-methyluridine-3'-phosphate
  modified_base 3: mod_base = OTHER; note = 5'-methyluridine-3'-phosphate
  modified_base 4: mod_base = OTHER; note = 5'-methyluridine-3'-phosphate
  modified_base 5: mod_base = OTHER; note = 5'-methyluridine-3'-phosphate
  modified_base 6: mod_base = OTHER; note = 5'-methyluridine-3'-phosphate
  modified_base 9: mod_base = OTHER; note = 5'-methyluridine-3'-phosphate
  modified_base 10: mod_base = OTHER; note = 5'-methyluridine-3'-phosphate
  modified_base 12: mod_base = OTHER; note = 5'-methyluridine-3'-phosphate
  modified_base 14: mod_base = OTHER; note = 5'-methyluridine-3'-phosphate
  modified_base 21: mod_base = OTHER; note = 5'-methyluridine-3'-phosphate
tgttttcattatctcaaaactgc

SEQ ID NO: 1736 - RNA, 23 nt, synthetic construct
  source 1..23: mol_type = other RNA
  modified_base 1: mod_base = OTHER; note = 5'-methyluridine-3'-phosphate
  modified_base 3: mod_base = OTHER; note = 5'-methyluridine-3'-phosphate
  modified_base 5: mod_base = OTHER; note = 5'-methyluridine-3'-phosphate
  modified_base 12: mod_base = OTHER; note = 5'-methyluridine-3'-phosphate
  modified_base 17: mod_base = OTHER; note = 5'-methyluridine-3'-phosphate
  modified_base 19: mod_base = OTHER; note = 5'-methyluridine-3'-phosphate
tatctcaaaactgcactgtcaag

SEQ ID NO: 1737 - RNA, 23 nt, synthetic construct
  source 1..23: mol_type = other RNA
  modified_base 4: mod_base = OTHER; note = 5'-methyluridine-3'-phosphate
  modified_base 9: mod_base = OTHER; note = 5'-methyluridine-3'-phosphate
  modified_base 11: mod_base = OTHER; note = 5'-methyluridine-3'-phosphate
  modified_base 17: mod_base = OTHER; note = 5'-methyluridine-3'-phosphate
  modified_base 20: mod_base = OTHER; note = 5'-methyluridine-3'-phosphate
  modified_base 23: mod_base = OTHER; note = 5'-methyluridine
aactgcactgtcaagatgatgat

SEQ ID NO: 1738 - RNA, 23 nt, synthetic construct
  source 1..23: mol_type = other RNA
  modified_base 2: mod_base = OTHER; note = 5'-methyluridine-3'-phosphate
  modified_base 8: mod_base = OTHER; note = 5'-methyluridine-3'-phosphate
  modified_base 11: mod_base = OTHER; note = 5'-methyluridine-3'-phosphate
  modified_base 14: mod_base = OTHER; note = 5'-methyluridine-3'-phosphate
  modified_base 17: mod_base = OTHER; note = 5'-methyluridine-3'-phosphate
  modified_base 19: mod_base = OTHER; note = 5'-methyluridine-3'-phosphate
  modified_base 20: mod_base = OTHER; note = 5'-methyluridine-3'-phosphate
  modified_base 21: mod_base = OTHER; note = 5'-methyluridine-3'-phosphate
gtcaagatgatgatgatctttaa

SEQ ID NO: 1739 - RNA, 23 nt, synthetic construct
  source 1..23: mol_type = other RNA
  modified_base 2: mod_base = OTHER; note = 5'-methyluridine-3'-phosphate
  modified_base 5: mod_base = OTHER; note = 5'-methyluridine-3'-phosphate
  modified_base 7: mod_base = OTHER; note = 5'-methyluridine-3'-phosphate
  modified_base 8: mod_base = OTHER; note = 5'-methyluridine-3'-phosphate
  modified_base 9: mod_base = OTHER; note = 5'-methyluridine-3'-phosphate
  modified_base 14: mod_base = OTHER; note = 5'-methyluridine-3'-phosphate
  modified_base 21: mod_base = OTHER; note = 5'-methyluridine-3'-phosphate
atgatctttaaaatacacactca

SEQ ID NO: 1740 - RNA, 23 nt, synthetic construct
  source 1..23: mol_type = other RNA
  modified_base 1: mod_base = OTHER; note = 5'-methyluridine-3'-phosphate
  modified_base 6: mod_base = OTHER; note = 5'-methyluridine-3'-phosphate
  modified_base 13: mod_base = OTHER; note = 5'-methyluridine-3'-phosphate
  modified_base 18: mod_base = OTHER; note = 5'-methyluridine-3'-phosphate
taaaatacacactcaaatcaaga

SEQ ID NO: 1741 - RNA, 23 nt, synthetic construct
  source 1..23: mol_type = other RNA
  modified_base 5: mod_base = OTHER; note = 5'-methyluridine-3'-phosphate
  modified_base 10: mod_base = OTHER; note = 5'-methyluridine-3'-phosphate
  modified_base 19: mod_base = OTHER; note = 5'-methyluridine-3'-phosphate
  modified_base 20: mod_base = OTHER; note = 5'-methyluridine-3'-phosphate
acactcaaatcaagaaacttaag

SEQ ID NO: 1742 - RNA, 23 nt, synthetic construct
  source 1..23: mol_type = other RNA
  modified_base 4: mod_base = OTHER; note = 5'-methyluridine-3'-phosphate
  modified_base 13: mod_base = OTHER; note = 5'-methyluridine-3'-phosphate
  modified_base 14: mod_base = OTHER; note = 5'-methyluridine-3'-phosphate
  modified_base 19: mod_base = OTHER; note = 5'-methyluridine-3'-phosphate
  modified_base 20: mod_base = OTHER; note = 5'-methyluridine-3'-phosphate
aaatcaagaaacttaaggttacc

SEQ ID NO: 1743 - RNA, 23 nt, synthetic construct
  source 1..23: mol_type = other RNA
  modified_base 5: mod_base = OTHER; note = 5'-methyluridine-3'-phosphate
  modified_base 6: mod_base = OTHER; note = 5'-methyluridine-3'-phosphate
  modified_base 11: mod_base = OTHER; note = 5'-methyluridine-3'-phosphate
  modified_base 12: mod_base = OTHER; note = 5'-methyluridine-3'-phosphate
  modified_base 16: mod_base = OTHER; note = 5'-methyluridine-3'-phosphate
  modified_base 17: mod_base = OTHER; note = 5'-methyluridine-3'-phosphate
  modified_base 18: mod_base = OTHER; note = 5'-methyluridine-3'-phosphate
  modified_base 20: mod_base = OTHER; note = 5'-methyluridine-3'-phosphate
  modified_base 21: mod_base = OTHER; note = 5'-methyluridine-3'-phosphate
aaacttaaggttacctttgttcc

SEQ ID NO: 1744 - RNA, 23 nt, synthetic construct
  source 1..23: mol_type = other RNA
  modified_base 1: mod_base = OTHER; note = 5'-methyluridine-3'-phosphate
  modified_base 2: mod_base = OTHER; note = 5'-methyluridine-3'-phosphate
  modified_base 6: mod_base = OTHER; note = 5'-methyluridine-3'-phosphate
  modified_base 7: mod_base = OTHER; note = 5'-methyluridine-3'-phosphate
  modified_base 8: mod_base = OTHER; note = 5'-methyluridine-3'-phosphate
  modified_base 10: mod_base = OTHER; note = 5'-methyluridine-3'-phosphate
  modified_base 11: mod_base = OTHER; note = 5'-methyluridine-3'-phosphate
  modified_base 18: mod_base = OTHER; note = 5'-methyluridine-3'-phosphate
  modified_base 19: mod_base = OTHER; note = 5'-methyluridine-3'-phosphate
  modified_base 20: mod_base = OTHER; note = 5'-methyluridine-3'-phosphate
  modified_base 23: mod_base = OTHER; note = 5'-methyluridine
ttacctttgttcccaaatttcat

SEQ ID NO: 1745 - RNA, 23 nt, synthetic construct
  source 1..23: mol_type = other RNA
  modified_base 1: mod_base = OTHER; note = 5'-methyluridine-3'-phosphate
  modified_base 2: mod_base = OTHER; note = 5'-methyluridine-3'-phosphate
  modified_base 4: mod_base = OTHER; note = 5'-methyluridine-3'-phosphate
  modified_base 5: mod_base = OTHER; note = 5'-methyluridine-3'-phosphate
  modified_base 12: mod_base = OTHER; note = 5'-methyluridine-3'-phosphate
  modified_base 13: mod_base = OTHER; note = 5'-methyluridine-3'-phosphate
  modified_base 14: mod_base = OTHER; note = 5'-methyluridine-3'-phosphate
  modified_base 17: mod_base = OTHER; note = 5'-methyluridine-3'-phosphate
  modified_base 21: mod_base = OTHER; note = 5'-methyluridine-3'-phosphate
  modified_base 23: mod_base = OTHER; note = 5'-methyluridine
ttgttcccaaatttcatacctat

SEQ ID NO: 1746 - RNA, 23 nt, synthetic construct
  source 1..23: mol_type = other RNA
  modified_base 6: mod_base = OTHER; note = 5'-methyluridine-3'-phosphate
  modified_base 7: mod_base = OTHER; note = 5'-methyluridine-3'-phosphate
  modified_base 8: mod_base = OTHER; note = 5'-methyluridine-3'-phosphate
  modified_base 11: mod_base = OTHER; note = 5'-methyluridine-3'-phosphate
  modified_base 15: mod_base = OTHER; note = 5'-methyluridine-3'-phosphate
  modified_base 17: mod_base = OTHER; note = 5'-methyluridine-3'-phosphate
  modified_base 20: mod_base = OTHER; note = 5'-methyluridine-3'-phosphate
  modified_base 22: mod_base = OTHER; note = 5'-methyluridine-3'-phosphate
  modified_base 23: mod_base = OTHER; note = 5'-methyluridine
ccaaatttcatacctatcatctt

SEQ ID NO: 1747 - RNA, 23 nt, synthetic construct
  source 1..23: mol_type = other RNA
  modified_base 1: mod_base = OTHER; note = 5'-methyluridine-3'-phosphate
  modified_base 4: mod_base = OTHER; note = 5'-methyluridine-3'-phosphate
  modified_base 8: mod_base = OTHER; note = 5'-methyluridine-3'-phosphate
  modified_base 10: mod_base = OTHER; note = 5'-methyluridine-3'-phosphate
  modified_base 13: mod_base = OTHER; note = 5'-methyluridine-3'-phosphate
  modified_base 15: mod_base = OTHER; note = 5'-methyluridine-3'-phosphate
  modified_base 16: mod_base = OTHER; note = 5'-methyluridine-3'-phosphate
  modified_base 20: mod_base = OTHER; note = 5'-methyluridine-3'-phosphate
tcatacctatcatcttaagtagg

SEQ ID NO: 1748 - RNA, 23 nt, synthetic construct
  source 1..23: mol_type = other RNA
  modified_base 2: mod_base = OTHER; note = 5'-methyluridine-3'-phosphate
  modified_base 5: mod_base = OTHER; note = 5'-methyluridine-3'-phosphate
  modified_base 7: mod_base = OTHER; note = 5'-methyluridine-3'-phosphate
  modified_base 8: mod_base = OTHER; note = 5'-methyluridine-3'-phosphate
  modified_base 12: mod_base = OTHER; note = 5'-methyluridine-3'-phosphate
  modified_base 19: mod_base = OTHER; note = 5'-methyluridine-3'-phosphate
  modified_base 20: mod_base = OTHER; note = 5'-methyluridine-3'-phosphate
  modified_base 22: mod_base = OTHER; note = 5'-methyluridine-3'-phosphate
atcatcttaagtagggacttctg

SEQ ID NO: 1749 - RNA, 23 nt, synthetic construct
  source 1..23: mol_type = other RNA
  modified_base 2: mod_base = OTHER; note = 5'-methyluridine-3'-phosphate
  modified_base 9: mod_base = OTHER; note = 5'-methyluridine-3'-phosphate
  modified_base 10: mod_base = OTHER; note = 5'-methyluridine-3'-phosphate
  modified_base 12: mod_base = OTHER; note = 5'-methyluridine-3'-phosphate
  modified_base 14: mod_base = OTHER; note = 5'-methyluridine-3'-phosphate
  modified_base 16: mod_base = OTHER; note = 5'-methyluridine-3'-phosphate
  modified_base 17: mod_base = OTHER; note = 5'-methyluridine-3'-phosphate
gtagggacttctgtcttcacaac

SEQ ID NO: 1750 - RNA, 23 nt, synthetic construct
  source 1..23: mol_type = other RNA
  modified_base 1: mod_base = OTHER; note = 5'-methyluridine-3'-phosphate
  modified_base 3: mod_base = OTHER; note = 5'-methyluridine-3'-phosphate
  modified_base 5: mod_base = OTHER; note = 5'-methyluridine-3'-phosphate
  modified_base 7: mod_base = OTHER; note = 5'-methyluridine-3'-phosphate
  modified_base 8: mod_base = OTHER; note = 5'-methyluridine-3'-phosphate
  modified_base 18: mod_base = OTHER; note = 5'-methyluridine-3'-phosphate
  modified_base 19: mod_base = OTHER; note = 5'-methyluridine-3'-phosphate
  modified_base 21: mod_base = OTHER; note = 5'-methyluridine-3'-phosphate
  modified_base 22: mod_base = OTHER; note = 5'-methyluridine-3'-phosphate
tctgtcttcacaacagattatta

SEQ ID NO: 1751 - RNA, 23 nt, synthetic construct
  source 1..23: mol_type = other RNA
  modified_base 1: mod_base = OTHER; note = 5'-methyluridine-3'-phosphate
  modified_base 11: mod_base = OTHER; note = 5'-methyluridine-3'-phosphate
  modified_base 12: mod_base = OTHER; note = 5'-methyluridine-3'-phosphate
  modified_base 14: mod_base = OTHER; note = 5'-methyluridine-3'-phosphate
  modified_base 15: mod_base = OTHER; note = 5'-methyluridine-3'-phosphate
  modified_base 19: mod_base = OTHER; note = 5'-methyluridine-3'-phosphate
  modified_base 20: mod_base = OTHER; note = 5'-methyluridine-3'-phosphate
tcacaacagattattaccttaca

SEQ ID NO: 1752 - RNA, 23 nt, synthetic construct
  source 1..23: mol_type = other RNA
  modified_base 4: mod_base = OTHER; note = 5'-methyluridine-3'-phosphate
  modified_base 5: mod_base = OTHER; note = 5'-methyluridine-3'-phosphate
  modified_base 7: mod_base = OTHER; note = 5'-methyluridine-3'-phosphate
  modified_base 8: mod_base = OTHER; note = 5'-methyluridine-3'-phosphate
  modified_base 12: mod_base = OTHER; note = 5'-methyluridine-3'-phosphate
  modified_base 13: mod_base = OTHER; note = 5'-methyluridine-3'-phosphate
  modified_base 21: mod_base = OTHER; note = 5'-methyluridine-3'-phosphate
  modified_base 22: mod_base = OTHER; note = 5'-methyluridine-3'-phosphate
  modified_base 23: mod_base = OTHER; note = 5'-methyluridine
agattattaccttacagaagttt

SEQ ID NO: 1753 - RNA, 23 nt, synthetic construct
  source 1..23: mol_type = other RNA
  modified_base 1: mod_base = OTHER; note = 5'-methyluridine-3'-phosphate
  modified_base 2: mod_base = OTHER; note = 5'-methyluridine-3'-phosphate
  modified_base 6: mod_base = OTHER; note = 5'-methyluridine-3'-phosphate
  modified_base 7: mod_base = OTHER; note = 5'-methyluridine-3'-phosphate
  modified_base 15: mod_base = OTHER; note = 5'-methyluridine-3'-phosphate
  modified_base 16: mod_base = OTHER; note = 5'-methyluridine-3'-phosphate
  modified_base 17: mod_base = OTHER; note = 5'-methyluridine-3'-phosphate
  modified_base 21: mod_base = OTHER; note = 5'-methyluridine-3'-phosphate
  modified_base 22: mod_base = OTHER; note = 5'-methyluridine-3'-phosphate
ttaccttacagaagtttgaatta

SEQ ID NO: 1754 - RNA, 23 nt, synthetic construct
  source 1..23: mol_type = other RNA
  modified_base 8: mod_base = OTHER; note = 5'-methyluridine-3'-phosphate
  modified_base 9: mod_base = OTHER; note = 5'-methyluridine-3'-phosphate
  modified_base 10: mod_base = OTHER; note = 5'-methyluridine-3'-phosphate
  modified_base 14: mod_base = OTHER; note = 5'-methyluridine-3'-phosphate
  modified_base 15: mod_base = OTHER; note = 5'-methyluridine-3'-phosphate
  modified_base 17: mod_base = OTHER; note = 5'-methyluridine-3'-phosphate
  modified_base 22: mod_base = OTHER; note = 5'-methyluridine-3'-phosphate
acagaagtttgaattatccggtc

SEQ ID NO: 1755 - RNA, 23 nt, synthetic construct
  source 1..23: mol_type = other RNA
  modified_base 2: mod_base = OTHER; note = 5'-methyluridine-3'-phosphate
  modified_base 3: mod_base = OTHER; note = 5'-methyluridine-3'-phosphate
  modified_base 4: mod_base = OTHER; note = 5'-methyluridine-3'-phosphate
  modified_base 8: mod_base = OTHER; note = 5'-methyluridine-3'-phosphate
  modified_base 9: mod_base = OTHER; note = 5'-methyluridine-3'-phosphate
  modified_base 11: mod_base = OTHER; note = 5'-methyluridine-3'-phosphate
  modified_base 16: mod_base = OTHER; note = 5'-methyluridine-3'-phosphate
  modified_base 21: mod_base = OTHER; note = 5'-methyluridine-3'-phosphate
  modified_base 22: mod_base = OTHER; note = 5'-methyluridine-3'-phosphate
  modified_base 23: mod_base = OTHER; note = 5'-methyluridine
gtttgaattatccggtcgggttt

SEQ ID NO: 1756 - RNA, 23 nt, synthetic construct
  source 1..23: mol_type = other RNA
  modified_base 1: mod_base = OTHER; note = 5'-methyluridine-3'-phosphate
  modified_base 2: mod_base = OTHER; note = 5'-methyluridine-3'-phosphate
  modified_base 4: mod_base = OTHER; note = 5'-methyluridine-3'-phosphate
  modified_base 9: mod_base = OTHER; note = 5'-methyluridine-3'-phosphate
  modified_base 14: mod_base = OTHER; note = 5'-methyluridine-3'-phosphate
  modified_base 15: mod_base = OTHER; note = 5'-methyluridine-3'-phosphate
  modified_base 16: mod_base = OTHER; note = 5'-methyluridine-3'-phosphate
  modified_base 17: mod_base = OTHER; note = 5'-methyluridine-3'-phosphate
  modified_base 19: mod_base = OTHER; note = 5'-methyluridine-3'-phosphate
  modified_base 20: mod_base = OTHER; note = 5'-methyluridine-3'-phosphate
  modified_base 22: mod_base = OTHER; note = 5'-methyluridine-3'-phosphate
  modified_base 23: mod_base = OTHER; note = 5'-methyluridine
ttatccggtcgggttttattgtt

SEQ ID NO: 1757 - RNA, 23 nt, synthetic construct
  source 1..23: mol_type = other RNA
  modified_base 3: mod_base = OTHER; note = 5'-methyluridine-3'-phosphate
  modified_base 8: mod_base = OTHER; note = 5'-methyluridine-3'-phosphate
  modified_base 9: mod_base = OTHER; note = 5'-methyluridine-3'-phosphate
  modified_base 10: mod_base = OTHER; note = 5'-methyluridine-3'-phosphate
  modified_base 11: mod_base = OTHER; note = 5'-methyluridine-3'-phosphate
  modified_base 13: mod_base = OTHER; note = 5'-methyluridine-3'-phosphate
  modified_base 14: mod_base = OTHER; note = 5'-methyluridine-3'-phosphate
  modified_base 16: mod_base = OTHER; note = 5'-methyluridine-3'-phosphate
  modified_base 17: mod_base = OTHER; note = 5'-methyluridine-3'-phosphate
  modified_base 18: mod_base = OTHER; note = 5'-methyluridine-3'-phosphate
  modified_base 23: mod_base = OTHER; note = 5'-methyluridine
ggtcgggttttattgtttaaaat

SEQ ID NO: 1758 - RNA, 23 nt, synthetic construct
  source 1..23: mol_type = other RNA
  modified_base 1: mod_base = OTHER; note = 5'-methyluridine-3'-phosphate
  modified_base 3: mod_base = OTHER; note = 5'-methyluridine-3'-phosphate
  modified_base 4: mod_base = OTHER; note = 5'-methyluridine-3'-phosphate
  modified_base 5: mod_base = OTHER; note = 5'-methyluridine-3'-phosphate
  modified_base 10: mod_base = OTHER; note = 5'-methyluridine-3'-phosphate
  modified_base 13: mod_base = OTHER; note = 5'-methyluridine-3'-phosphate
  modified_base 14: mod_base = OTHER; note = 5'-methyluridine-3'-phosphate
  modified_base 15: mod_base = OTHER; note = 5'-methyluridine-3'-phosphate
  modified_base 17: mod_base = OTHER; note = 5'-methyluridine-3'-phosphate
  modified_base 21: mod_base = OTHER; note = 5'-methyluridine-3'-phosphate
tgtttaaaatcatttctgcatca

SEQ ID NO: 1759 - RNA, 23 nt, synthetic construct
  source 1..23: mol_type = other RNA
  modified_base 3: mod_base = OTHER; note = 5'-methyluridine-3'-phosphate
  modified_base 6: mod_base = OTHER; note = 5'-methyluridine-3'-phosphate
  modified_base 7: mod_base = OTHER; note = 5'-methyluridine-3'-phosphate
  modified_base 8: mod_base = OTHER; note = 5'-methyluridine-3'-phosphate
  modified_base 10: mod_base = OTHER; note = 5'-methyluridine-3'-phosphate
  modified_base 14: mod_base = OTHER; note = 5'-methyluridine-3'-phosphate
  modified_base 19: mod_base = OTHER; note = 5'-methyluridine-3'-phosphate
  modified_base 22: mod_base = OTHER; note = 5'-methyluridine-3'-phosphate
aatcatttctgcatcagctgctg

SEQ ID NO: 1760 - RNA, 23 nt, synthetic construct
  source 1..23: mol_type = other RNA
  modified_base 1: mod_base = OTHER; note = 5'-methyluridine-3'-phosphate
  modified_base 2: mod_base = OTHER; note = 5'-methyluridine-3'-phosphate
  modified_base 4: mod_base = OTHER; note = 5'-methyluridine-3'-phosphate
  modified_base 8: mod_base = OTHER; note = 5'-methyluridine-3'-phosphate
  modified_base 13: mod_base = OTHER; note = 5'-methyluridine-3'-phosphate
  modified_base 16: mod_base = OTHER; note = 5'-methyluridine-3'-phosphate
ttctgcatcagctgctgaaacaa

SEQ ID NO: 1761 - RNA, 23 nt, synthetic construct
  source 1..23: mol_type = other RNA
  modified_base 2: mod_base = OTHER; note = 5'-methyluridine-3'-phosphate
  modified_base 7: mod_base = OTHER; note = 5'-methyluridine-3'-phosphate
  modified_base 10: mod_base = OTHER; note = 5'-methyluridine-3'-phosphate
  modified_base 22: mod_base = OTHER; note = 5'-methyluridine-3'-phosphate
atcagctgctgaaacaacaaata

SEQ ID NO: 1762 - RNA, 23 nt, synthetic construct
  source 1..23: mol_type = other RNA
  modified_base 1: mod_base = OTHER; note = 5'-methyluridine-3'-phosphate
  modified_base 13: mod_base = OTHER; note = 5'-methyluridine-3'-phosphate
  modified_base 19: mod_base = OTHER; note = 5'-methyluridine-3'-phosphate
  modified_base 20: mod_base = OTHER; note = 5'-methyluridine-3'-phosphate
  modified_base 22: mod_base = OTHER; note = 5'-methyluridine-3'-phosphate
  modified_base 23: mod_base = OTHER; note = 5'-methyluridine
tgaaacaacaaataggaattgtt

SEQ ID NO: 1763 - RNA, 23 nt, synthetic construct
  source 1..23: mol_type = other RNA
  modified_base 2: mod_base = OTHER; note = 5'-methyluridine-3'-phosphate
  modified_base 8: mod_base = OTHER; note = 5'-methyluridine-3'-phosphate
  modified_base 9: mod_base = OTHER; note = 5'-methyluridine-3'-phosphate
  modified_base 11: mod_base = OTHER; note = 5'-methyluridine-3'-phosphate
  modified_base 12: mod_base = OTHER; note = 5'-methyluridine-3'-phosphate
  modified_base 13: mod_base = OTHER; note = 5'-methyluridine-3'-phosphate
  modified_base 14: mod_base = OTHER; note = 5'-methyluridine-3'-phosphate
  modified_base 15: mod_base = OTHER; note = 5'-methyluridine-3'-phosphate
  modified_base 17: mod_base = OTHER; note = 5'-methyluridine-3'-phosphate
ataggaattgtttttatggaggc

SEQ ID NO: 1764 - RNA, 23 nt, synthetic construct
  source 1..23: mol_type = other RNA
  modified_base 1: mod_base = OTHER; note = 5'-methyluridine-3'-phosphate
  modified_base 2: mod_base = OTHER; note = 5'-methyluridine-3'-phosphate
  modified_base 4: mod_base = OTHER; note = 5'-methyluridine-3'-phosphate
  modified_base 5: mod_base = OTHER; note = 5'-methyluridine-3'-phosphate
  modified_base 6: mod_base = OTHER; note = 5'-methyluridine-3'-phosphate
  modified_base 7: mod_base = OTHER; note = 5'-methyluridine-3'-phosphate
  modified_base 8: mod_base = OTHER; note = 5'-methyluridine-3'-phosphate
  modified_base 10: mod_base = OTHER; note = 5'-methyluridine-3'-phosphate
  modified_base 17: mod_base = OTHER; note = 5'-methyluridine-3'-phosphate
  modified_base 18: mod_base = OTHER; note = 5'-methyluridine-3'-phosphate
  modified_base 19: mod_base = OTHER; note = 5'-methyluridine-3'-phosphate
  modified_base 23: mod_base = OTHER; note = 5'-methyluridine
ttgtttttatggaggctttgcat

SEQ ID NO: 1765 - RNA, 23 nt, synthetic construct
  source 1..23: mol_type = other RNA
  modified_base 7: mod_base = OTHER; note = 5'-methyluridine-3'-phosphate
  modified_base 8: mod_base = OTHER; note = 5'-methyluridine-3'-phosphate
  modified_base 9: mod_base = OTHER; note = 5'-methyluridine-3'-phosphate
  modified_base 13: mod_base = OTHER; note = 5'-methyluridine-3'-phosphate
  modified_base 17: mod_base = OTHER; note = 5'-methyluridine-3'-phosphate
  modified_base 18: mod_base = OTHER; note = 5'-methyluridine-3'-phosphate
  modified_base 22: mod_base = OTHER; note = 5'-methyluridine-3'-phosphate
ggaggctttgcatagattccctg

SEQ ID NO: 1766 - RNA, 23 nt, synthetic construct
  source 1..23: mol_type = other RNA
  modified_base 1: mod_base = OTHER; note = 5'-methyluridine-3'-phosphate
  modified_base 2: mod_base = OTHER; note = 5'-methyluridine-3'-phosphate
  modified_base 3: mod_base = OTHER; note = 5'-methyluridine-3'-phosphate
  modified_base 7: mod_base = OTHER; note = 5'-methyluridine-3'-phosphate
  modified_base 11: mod_base = OTHER; note = 5'-methyluridine-3'-phosphate
  modified_base 12: mod_base = OTHER; note = 5'-methyluridine-3'-phosphate
  modified_base 16: mod_base = OTHER; note = 5'-methyluridine-3'-phosphate
tttgcatagattccctgagcagg

SEQ ID NO: 1767 - RNA, 23 nt, synthetic construct
  source 1..23: mol_type = other RNA
  modified_base 4: mod_base = OTHER; note = 5'-methyluridine-3'-phosphate
  modified_base 5: mod_base = OTHER; note = 5'-methyluridine-3'-phosphate
  modified_base 9: mod_base = OTHER; note = 5'-methyluridine-3'-phosphate
  modified_base 18: mod_base = OTHER; note = 5'-methyluridine-3'-phosphate
  modified_base 19: mod_base = OTHER; note = 5'-methyluridine-3'-phosphate
  modified_base 20: mod_base = OTHER; note = 5'-methyluridine-3'-phosphate
  modified_base 21: mod_base = OTHER; note = 5'-methyluridine-3'-phosphate
agattccctgagcaggattttaa

SEQ ID NO: 1768 - RNA, 23 nt, synthetic construct
  source 1..23: mol_type = other RNA
  modified_base 3: mod_base = OTHER; note = 5'-methyluridine-3'-phosphate
  modified_base 12: mod_base = OTHER; note = 5'-methyluridine-3'-phosphate
  modified_base 13: mod_base = OTHER; note = 5'-methyluridine-3'-phosphate
  modified_base 14: mod_base = OTHER; note = 5'-methyluridine-3'-phosphate
  modified_base 15: mod_base = OTHER; note = 5'-methyluridine-3'-phosphate
  modified_base 18: mod_base = OTHER; note = 5'-methyluridine-3'-phosphate
  modified_base 20: mod_base = OTHER; note = 5'-methyluridine-3'-phosphate
  modified_base 21: mod_base = OTHER; note = 5'-methyluridine-3'-phosphate
  modified_base 22: mod_base = OTHER; note = 5'-methyluridine-3'-phosphate
  modified_base 23: mod_base = OTHER; note = 5'-methyluridine
cctgagcaggattttaatctttt

SEQ ID NO: 1769 - RNA, 23 nt, synthetic construct
  source 1..23: mol_type = other RNA
  modified_base 1: mod_base = OTHER; note = 5'-methyluridine-3'-phosphate
  modified_base 2: mod_base = OTHER; note = 5'-methyluridine-3'-phosphate
  modified_base 3: mod_base = OTHER; note = 5'-methyluridine-3'-phosphate
  modified_base 6: mod_base = OTHER; note = 5'-methyluridine-3'-phosphate
  modified_base 8: mod_base = OTHER; note = 5'-methyluridine-3'-phosphate
  modified_base 9: mod_base = OTHER; note = 5'-methyluridine-3'-phosphate
  modified_base 10: mod_base = OTHER; note = 5'-methyluridine-3'-phosphate
  modified_base 11: mod_base = OTHER; note = 5'-methyluridine-3'-phosphate
  modified_base 12: mod_base = OTHER; note = 5'-methyluridine-3'-phosphate
  modified_base 14: mod_base = OTHER; note = 5'-methyluridine-3'-phosphate
  modified_base 18: mod_base = OTHER; note = 5'-methyluridine-3'-phosphate
  modified_base 23: mod_base = OTHER; note = 5'-methyluridine
tttaatctttttctaactggact

SEQ ID NO: 1770 - RNA, 23 nt, synthetic construct
  source 1..23: mol_type = other RNA
  modified_base 1: mod_base = OTHER; note = 5'-methyluridine-3'-phosphate
  modified_base 2: mod_base = OTHER; note = 5'-methyluridine-3'-phosphate
  modified_base 3: mod_base = OTHER; note = 5'-methyluridine-3'-phosphate
  modified_base 5: mod_base = OTHER; note = 5'-methyluridine-3'-phosphate
  modified_base 9: mod_base = OTHER; note = 5'-methyluridine-3'-phosphate
  modified_base 14: mod_base = OTHER; note = 5'-methyluridine-3'-phosphate
  modified_base 17: mod_base = OTHER; note = 5'-methyluridine-3'-phosphate
  modified_base 18: mod_base = OTHER; note = 5'-methyluridine-3'-phosphate
  modified_base 23: mod_base = OTHER; note = 5'-methyluridine
tttctaactggactggttcaaat

SEQ ID NO: 1771 - RNA, 23 nt, synthetic construct
  source 1..23: mol_type = other RNA
  modified_base 2: mod_base = OTHER; note = 5'-methyluridine-3'-phosphate
  modified_base 7: mod_base = OTHER; note = 5'-methyluridine-3'-phosphate
  modified_base 10: mod_base = OTHER; note = 5'-methyluridine-3'-phosphate
  modified_base 11: mod_base = OTHER; note = 5'-methyluridine-3'-phosphate
  modified_base 16: mod_base = OTHER; note = 5'-methyluridine-3'-phosphate
  modified_base 18: mod_base = OTHER; note = 5'-methyluridine-3'-phosphate
  modified_base 19: mod_base = OTHER; note = 5'-methyluridine-3'-phosphate
  modified_base 21: mod_base = OTHER; note = 5'-methyluridine-3'-phosphate
  modified_base 22: mod_base = OTHER; note = 5'-methyluridine-3'-phosphate
ctggactggttcaaatgttgttc

SEQ ID NO: 1772 - RNA, 23 nt, synthetic construct
  source 1..23: mol_type = other RNA
  modified_base 1: mod_base = OTHER; note = 5'-methyluridine-3'-phosphate
  modified_base 6: mod_base = OTHER; note = 5'-methyluridine-3'-phosphate
  modified_base 8: mod_base = OTHER; note = 5'-methyluridine-3'-phosphate
  modified_base 9: mod_base = OTHER; note = 5'-methyluridine-3'-phosphate
  modified_base 11: mod_base = OTHER; note = 5'-methyluridine-3'-phosphate
  modified_base 12: mod_base = OTHER; note = 5'-methyluridine-3'-phosphate
  modified_base 14: mod_base = OTHER; note = 5'-methyluridine-3'-phosphate
  modified_base 16: mod_base = OTHER; note = 5'-methyluridine-3'-phosphate
  modified_base 17: mod_base = OTHER; note = 5'-methyluridine-3'-phosphate
  modified_base 19: mod_base = OTHER; note = 5'-methyluridine-3'-phosphate
  modified_base 20: mod_base = OTHER; note = 5'-methyluridine-3'-phosphate
  modified_base 21: mod_base = OTHER; note = 5'-methyluridine-3'-phosphate
tcaaatgttgttctcttctttaa

SEQ ID NO: 1773 - RNA, 23 nt, synthetic construct
  source 1..23: mol_type = other RNA
  modified_base 1: mod_base = OTHER; note = 5'-methyluridine-3'-phosphate
  modified_base 3: mod_base = OTHER; note = 5'-methyluridine-3'-phosphate
  modified_base 4: mod_base = OTHER; note = 5'-methyluridine-3'-phosphate
  modified_base 6: mod_base = OTHER; note = 5'-methyluridine-3'-phosphate
  modified_base 8: mod_base = OTHER; note = 5'-methyluridine-3'-phosphate
  modified_base 9: mod_base = OTHER; note = 5'-methyluridine-3'-phosphate
  modified_base 11: mod_base = OTHER; note = 5'-methyluridine-3'-phosphate
  modified_base 12: mod_base = OTHER; note = 5'-methyluridine-3'-phosphate
  modified_base 13: mod_base = OTHER; note = 5'-methyluridine-3'-phosphate
  modified_base 21: mod_base = OTHER; note = 5'-methyluridine-3'-phosphate
tgttctcttctttaaagggatgg

SEQ ID NO: 1774 - RNA, 23 nt, synthetic construct
  source 1..23: mol_type = other RNA
  modified_base 1: mod_base = OTHER; note = 5'-methyluridine-3'-phosphate
  modified_base 2: mod_base = OTHER; note = 5'-methyluridine-3'-phosphate
  modified_base 4: mod_base = OTHER; note = 5'-methyluridine-3'-phosphate
  modified_base 5: mod_base = OTHER; note = 5'-methyluridine-3'-phosphate
  modified_base 6: mod_base = OTHER; note = 5'-methyluridine-3'-phosphate
  modified_base 14: mod_base = OTHER; note = 5'-methyluridine-3'-phosphate
  modified_base 22: mod_base = OTHER; note = 5'-methyluridine-3'-phosphate
ttctttaaagggatggcaagatg

SEQ ID NO: 1775 - RNA, 23 nt, synthetic construct
  source 1..23: mol_type = other RNA
  modified_base 2: mod_base = OTHER; note = 5'-methyluridine-3'-phosphate
  modified_base 10: mod_base = OTHER; note = 5'-methyluridine-3'-phosphate
  modified_base 12: mod_base = OTHER; note = 5'-methyluridine-3'-phosphate
  modified_base 19: mod_base = OTHER; note = 5'-methyluridine-3'-phosphate
  modified_base 22: mod_base = OTHER; note = 5'-methyluridine-3'-phosphate
atggcaagatgtgggcagtgatg

SEQ ID NO: 1776 - RNA, 23 nt, synthetic construct
  source 1..23: mol_type = other RNA
  modified_base 1: mod_base = OTHER; note = 5'-methyluridine-3'-phosphate
  modified_base 3: mod_base = OTHER; note = 5'-methyluridine-3'-phosphate
  modified_base 10: mod_base = OTHER; note = 5'-methyluridine-3'-phosphate
  modified_base 13: mod_base = OTHER; note = 5'-methyluridine-3'-phosphate
  modified_base 15: mod_base = OTHER; note = 5'-methyluridine-3'-phosphate
  modified_base 19: mod_base = OTHER; note = 5'-methyluridine-3'-phosphate
tgtgggcagtgatgtcactaggg

SEQ ID NO: 1777 - RNA, 23 nt, synthetic construct
  source 1..23: mol_type = other RNA
  modified_base 12: mod_base = OTHER; note = 5'-methyluridine-3'-phosphate
  modified_base 21: mod_base = OTHER; note = 5'-methyluridine-3'-phosphate
  modified_base 22: mod_base = OTHER; note = 5'-methyluridine-3'-phosphate
cagggacaggataagagggatta

SEQ ID NO: 1778 - RNA, 23 nt, synthetic construct
  source 1..23: mol_type = other RNA
  modified_base 6: mod_base = OTHER; note = 5'-methyluridine-3'-phosphate
  modified_base 15: mod_base = OTHER; note = 5'-methyluridine-3'-phosphate
  modified_base 16: mod_base = OTHER; note = 5'-methyluridine-3'-phosphate
caggataagagggattagggaga

SEQ ID NO: 1779 - RNA, 23 nt, synthetic construct
  source 1..23: mol_type = other RNA
  modified_base 8: mod_base = OTHER; note = 5'-methyluridine-3'-phosphate
  modified_base 9: mod_base = OTHER; note = 5'-methyluridine-3'-phosphate
  modified_base 22: mod_base = OTHER; note = 5'-methyluridine-3'-phosphate
agagggattagggagagaagata

SEQ ID NO: 1780 - RNA, 23 nt, synthetic construct
  source 1..23: mol_type = other RNA
  modified_base 2: mod_base = OTHER; note = 5'-methyluridine-3'-phosphate
  modified_base 3: mod_base = OTHER; note = 5'-methyluridine-3'-phosphate
  modified_base 16: mod_base = OTHER; note = 5'-methyluridine-3'-phosphate
attagggagagaagatagcaggg

SEQ ID NO: 1781 - RNA, 23 nt, synthetic construct
  source 1..23: mol_type = other RNA
  modified_base 4: mod_base = OTHER; note = 5'-methyluridine-3'-phosphate
  modified_base 16: mod_base = OTHER; note = 5'-methyluridine-3'-phosphate
ggctgggaacccaagtccaagca

SEQ ID NO: 1782 - RNA, 23 nt, synthetic construct
  source 1..23: mol_type = other RNA
  modified_base 10: mod_base = OTHER; note = 5'-methyluridine-3'-phosphate
  modified_base 18: mod_base = OTHER; note = 5'-methyluridine-3'-phosphate
gaacccaagtccaagcataccaa

SEQ ID NO: 1783 - RNA, 23 nt, synthetic construct
  source 1..23: mol_type = other RNA
  modified_base 4: mod_base = OTHER; note = 5'-methyluridine-3'-phosphate
  modified_base 12: mod_base = OTHER; note = 5'-methyluridine-3'-phosphate
aagtccaagcataccaacacgag

SEQ ID NO: 1784 - RNA, 23 nt, synthetic construct
  source 1..23: mol_type = other RNA
  modified_base 17: mod_base = OTHER; note = 5'-methyluridine-3'-phosphate
  modified_base 20: mod_base = OTHER; note = 5'-methyluridine-3'-phosphate
  modified_base 22: mod_base = OTHER; note = 5'-methyluridine-3'-phosphate
accaacacgagcaggctactgtc

SEQ ID NO: 1785 - RNA, 23 nt, synthetic construct
  source 1..23: mol_type = other RNA
  modified_base 11: mod_base = OTHER; note = 5'-methyluridine-3'-phosphate
  modified_base 14: mod_base = OTHER; note = 5'-methyluridine-3'-phosphate
  modified_base 16: mod_base = OTHER; note = 5'-methyluridine-3'-phosphate
  modified_base 21: mod_base = OTHER; note = 5'-methyluridine-3'-phosphate
acgagcaggctactgtcagctcc

SEQ ID NO: 1786 - RNA, 23 nt, synthetic construct
  source 1..23: mol_type = other RNA
  modified_base 2: mod_base = OTHER; note = 5'-methyluridine-3'-phosphate
  modified_base 14: mod_base = OTHER; note = 5'-methyluridine-3'-phosphate
  modified_base 16: mod_base = OTHER; note = 5'-methyluridine-3'-phosphate
  modified_base 17: mod_base = OTHER; note = 5'-methyluridine-3'-phosphate
ctcggagaagagctgttcacagc

SEQ ID NO: 1787 - RNA, 23 nt, synthetic construct
  source 1..23: mol_type = other RNA
  modified_base 7: mod_base = OTHER; note = 5'-methyluridine-3'-phosphate
  modified_base 9: mod_base = OTHER; note = 5'-methyluridine-3'-phosphate
  modified_base 10: mod_base = OTHER; note = 5'-methyluridine-3'-phosphate
  modified_base 22: mod_base = OTHER; note = 5'-methyluridine-3'-phosphate
aagagctgttcacagccagactg

SEQ ID NO: 1788 - RNA, 23 nt, synthetic construct
  source 1..23: mol_type = other RNA
  modified_base 1: mod_base = OTHER; note = 5'-methyluridine-3'-phosphate
  modified_base 13: mod_base = OTHER; note = 5'-methyluridine-3'-phosphate
  modified_base 21: mod_base = OTHER; note = 5'-methyluridine-3'-phosphate
  modified_base 22: mod_base = OTHER; note = 5'-methyluridine-3'-phosphate
  modified_base 23: mod_base = OTHER; note = 5'-methyluridine
tcacagccagactggcacagttt

SEQ ID NO: 1789 - RNA, 23 nt, synthetic construct
  source 1..23: mol_type = other RNA
  modified_base 3: mod_base = OTHER; note = 5'-methyluridine-3'-phosphate
  modified_base 11: mod_base = OTHER; note = 5'-methyluridine-3'-phosphate
  modified_base 12: mod_base = OTHER; note = 5'-methyluridine-3'-phosphate
  modified_base 13: mod_base = OTHER; note = 5'-methyluridine-3'-phosphate
  modified_base 14: mod_base = OTHER; note = 5'-methyluridine-3'-phosphate
  modified_base 16: mod_base = OTHER; note = 5'-methyluridine-3'-phosphate
actggcacagttttctgagaaag

SEQ ID NO: 1790 - RNA, 23 nt, synthetic construct
  source 1..23: mol_type = other RNA
  modified_base 5: mod_base = OTHER; note = 5'-methyluridine-3'-phosphate
  modified_base 6: mod_base = OTHER; note = 5'-methyluridine-3'-phosphate
  modified_base 7: mod_base = OTHER; note = 5'-methyluridine-3'-phosphate
  modified_base 8: mod_base = OTHER; note = 5'-methyluridine-3'-phosphate
  modified_base 10: mod_base = OTHER; note = 5'-methyluridine-3'-phosphate
  modified_base 20: mod_base = OTHER; note = 5'-methyluridine-3'-phosphate
  modified_base 22: mod_base = OTHER; note = 5'-methyluridine-3'-phosphate
  modified_base 23: mod_base = OTHER; note = 5'-methyluridine
acagttttctgagaaagactatt

SEQ ID NO: 1791 - RNA, 23 nt, synthetic construct
  source 1..23: mol_type = other RNA
  modified_base 1: mod_base = OTHER; note = 5'-methyluridine-3'-phosphate
  modified_base 2: mod_base = OTHER; note = 5'-methyluridine-3'-phosphate
  modified_base 4: mod_base = OTHER; note = 5'-methyluridine-3'-phosphate
  modified_base 14: mod_base = OTHER; note = 5'-methyluridine-3'-phosphate
  modified_base 16: mod_base = OTHER; note = 5'-methyluridine-3'-phosphate
  modified_base 17: mod_base = OTHER; note = 5'-methyluridine-3'-phosphate
ttctgagaaagactattcaaaca

SEQ ID NO: 1792 - RNA, 23 nt, synthetic construct
  source 1..23: mol_type = other RNA
  modified_base 8: mod_base = OTHER; note = 5'-methyluridine-3'-phosphate
  modified_base 10: mod_base = OTHER; note = 5'-methyluridine-3'-phosphate
  modified_base 11: mod_base = OTHER; note = 5'-methyluridine-3'-phosphate
  modified_base 19: mod_base = OTHER; note = 5'-methyluridine-3'-phosphate
  modified_base 21: mod_base = OTHER; note = 5'-methyluridine-3'-phosphate
gaaagactattcaaacagtctca

SEQ ID NO: 1793 - RNA, 23 nt, synthetic construct
  source 1..23: mol_type = other RNA
  modified_base 1: mod_base = OTHER; note = 5'-methyluridine-3'-phosphate
  modified_base 3: mod_base = OTHER; note = 5'-methyluridine-3'-phosphate
  modified_base 4: mod_base = OTHER; note = 5'-methyluridine-3'-phosphate
  modified_base 12: mod_base = OTHER; note = 5'-methyluridine-3'-phosphate
  modified_base 14: mod_base = OTHER; note = 5'-methyluridine-3'-phosphate
  modified_base 22: mod_base = OTHER; note = 5'-methyluridine-3'-phosphate
tattcaaacagtctcaggaaatc

SEQ ID NO: 1794 - RNA, 23 nt, synthetic construct
  source 1..23: mol_type = other RNA
  modified_base 4: mod_base = OTHER; note = 5'-methyluridine-3'-phosphate
  modified_base 6: mod_base = OTHER; note = 5'-methyluridine-3'-phosphate
  modified_base 14: mod_base = OTHER; note = 5'-methyluridine-3'-phosphate
  modified_base 19: mod_base = OTHER; note = 5'-methyluridine-3'-phosphate
  modified_base 21: mod_base = OTHER; note = 5'-methyluridine-3'-phosphate
cagtctcaggaaatcaaatatgc

SEQ ID NO: 1795 - RNA, 23 nt, synthetic construct
  source 1..23: mol_type = other RNA
  modified_base 8: mod_base = OTHER; note = 5'-methyluridine-3'-phosphate
  modified_base 13: mod_base = OTHER; note = 5'-methyluridine-3'-phosphate
  modified_base 15: mod_base = OTHER; note = 5'-methyluridine-3'-phosphate
caggaaatcaaatatgcaaagca

SEQ ID NO: 1796 - RNA, 23 nt, synthetic construct
  source 1..23: mol_type = other RNA
  modified_base 2: mod_base = OTHER; note = 5'-methyluridine-3'-phosphate
  modified_base 7: mod_base = OTHER; note = 5'-methyluridine-3'-phosphate
  modified_base 9: mod_base = OTHER; note = 5'-methyluridine-3'-phosphate
  modified_base 19: mod_base = OTHER; note = 5'-methyluridine-3'-phosphate
  modified_base 23: mod_base = OTHER; note = 5'-methyluridine
atcaaatatgcaaagcactgact

SEQ ID NO: 1797 - RNA, 23 nt, synthetic construct
  source 1..23: mol_type = other RNA
  modified_base 1: mod_base = OTHER; note = 5'-methyluridine-3'-phosphate
  modified_base 3: mod_base = OTHER; note = 5'-methyluridine-3'-phosphate
  modified_base 13: mod_base = OTHER; note = 5'-methyluridine-3'-phosphate
  modified_base 17: mod_base = OTHER; note = 5'-methyluridine-3'-phosphate
  modified_base 18: mod_base = OTHER; note = 5'-methyluridine-3'-phosphate
  modified_base 20: mod_base = OTHER; note = 5'-methyluridine-3'-phosphate
tatgcaaagcactgacttctaag

SEQ ID NO: 1798 - RNA, 23 nt, synthetic construct
  source 1..23: mol_type = other RNA
  modified_base 7: mod_base = OTHER; note = 5'-methyluridine-3'-phosphate
  modified_base 11: mod_base = OTHER; note = 5'-methyluridine-3'-phosphate
  modified_base 12: mod_base = OTHER; note = 5'-methyluridine-3'-phosphate
  modified_base 14: mod_base = OTHER; note = 5'-methyluridine-3'-phosphate
  modified_base 18: mod_base = OTHER; note = 5'-methyluridine-3'-phosphate
aagcactgacttctaagtaaaac

SEQ ID NO: 1799 - RNA, 23 nt, synthetic construct
  source 1..23: mol_type = other RNA
  modified_base 1: mod_base = OTHER; note = 5'-methyluridine-3'-phosphate
  modified_base 5: mod_base = OTHER; note = 5'-methyluridine-3'-phosphate
  modified_base 6: mod_base = OTHER; note = 5'-methyluridine-3'-phosphate
  modified_base 8: mod_base = OTHER; note = 5'-methyluridine-3'-phosphate
  modified_base 12: mod_base = OTHER; note = 5'-methyluridine-3'-phosphate
tgacttctaagtaaaaccacagc

SEQ ID NO: 1800 - RNA, 23 nt, synthetic construct
  source 1..23: mol_type = other RNA
  modified_base 4: mod_base = OTHER; note = 5'-methyluridine-3'-phosphate
  modified_base 18: mod_base = OTHER; note = 5'-methyluridine-3'-phosphate
  modified_base 19: mod_base = OTHER; note = 5'-methyluridine-3'-phosphate
aagtaaaaccacagcagttgaaa

SEQ ID NO: 1801 - RNA, 23 nt, synthetic construct
  source 1..23: mol_type = other RNA
  modified_base 12: mod_base = OTHER; note = 5'-methyluridine-3'-phosphate
  modified_base 13: mod_base = OTHER; note = 5'-methyluridine-3'-phosphate
  modified_base 22: mod_base = OTHER; note = 5'-methyluridine-3'-phosphate
aaccacagcagttgaaaagactc

SEQ ID NO: 1802 - RNA, 23 nt, synthetic construct
  source 1..23: mol_type = other RNA
  modified_base 3: mod_base = OTHER; note = 5'-methyluridine-3'-phosphate
  modified_base 4: mod_base = OTHER; note = 5'-methyluridine-3'-phosphate
  modified_base 13: mod_base = OTHER; note = 5'-methyluridine-3'-phosphate
  modified_base 23: mod_base = OTHER; note = 5'-methyluridine
agttgaaaagactccaaagaaat

SEQ ID NO: 1803 - RNA, 23 nt, synthetic construct
  source 1..23: mol_type = other RNA
  modified_base 7: mod_base = OTHER; note = 5'-methyluridine-3'-phosphate
  modified_base 17: mod_base = OTHER; note = 5'-methyluridine-3'-phosphate
  modified_base 19: mod_base = OTHER; note = 5'-methyluridine-3'-phosphate
aaagactccaaagaaatgtaagg

SEQ ID NO: 1804 - RNA, 23 nt, synthetic construct
  source 1..23: mol_type = other RNA
  modified_base 10: mod_base = OTHER; note = 5'-methyluridine-3'-phosphate
  modified_base 12: mod_base = OTHER; note = 5'-methyluridine-3'-phosphate
  modified_base 22: mod_base = OTHER; note = 5'-methyluridine-3'-phosphate
ccaaagaaatgtaagggaaactg

SEQ ID NO: 1805 - RNA, 23 nt, synthetic construct
  source 1..23: mol_type = other RNA
  modified_base 2: mod_base = OTHER; note = 5'-methyluridine-3'-phosphate
  modified_base 12: mod_base = OTHER; note = 5'-methyluridine-3'-phosphate
gtaagggaaactgccagcaacgc

SEQ ID NO: 1806 - RNA, 23 nt, synthetic construct
  source 1..23: mol_type = other RNA
  modified_base 4: mod_base = OTHER; note = 5'-methyluridine-3'-phosphate
  modified_base 10: mod_base = OTHER; note = 5'-methyluridine-3'-phosphate
  modified_base 11: mod_base = OTHER; note = 5'-methyluridine-3'-phosphate
  modified_base 13: mod_base = OTHER; note = 5'-methyluridine-3'-phosphate
  modified_base 17: mod_base = OTHER; note = 5'-methyluridine-3'-phosphate
  modified_base 19: mod_base = OTHER; note = 5'-methyluridine-3'-phosphate
  modified_base 23: mod_base = OTHER; note = 5'-methyluridine
aggtgccagttatggctataggt

SEQ ID NO: 1807 - RNA, 23 nt, synthetic construct
  source 1..23: mol_type = other RNA
  modified_base 1: mod_base = OTHER; note = 5'-methyluridine-3'-phosphate
  modified_base 2: mod_base = OTHER; note = 5'-methyluridine-3'-phosphate
  modified_base 4: mod_base = OTHER; note = 5'-methyluridine-3'-phosphate
  modified_base 8: mod_base = OTHER; note = 5'-methyluridine-3'-phosphate
  modified_base 10: mod_base = OTHER; note = 5'-methyluridine-3'-phosphate
  modified_base 14: mod_base = OTHER; note = 5'-methyluridine-3'-phosphate
  modified_base 17: mod_base = OTHER; note = 5'-methyluridine-3'-phosphate
ttatggctataggtgctacaaaa

SEQ ID NO: 1808 - RNA, 23 nt, synthetic construct
  source 1..23: mol_type = other RNA
  modified_base 13: mod_base = OTHER; note = 5'-methyluridine-3'-phosphate
  modified_base 16: mod_base = OTHER; note = 5'-methyluridine-3'-phosphate
acacagcaagggtgatgggaaag

SEQ ID NO: 1809 - RNA, 23 nt, synthetic construct
  source 1..23: mol_type = other RNA
  modified_base 6: mod_base = OTHER; note = 5'-methyluridine-3'-phosphate
  modified_base 9: mod_base = OTHER; note = 5'-methyluridine-3'-phosphate
  modified_base 19: mod_base = OTHER; note = 5'-methyluridine-3'-phosphate
  modified_base 20: mod_base = OTHER; note = 5'-methyluridine-3'-phosphate
  modified_base 22: mod_base = OTHER; note = 5'-methyluridine-3'-phosphate
aagggtgatgggaaagcattgta

SEQ ID NO: 1810 - RNA, 23 nt, synthetic construct
  source 1..23: mol_type = other RNA
  modified_base 3: mod_base = OTHER; note = 5'-methyluridine-3'-phosphate
  modified_base 13: mod_base = OTHER; note = 5'-methyluridine-3'-phosphate
  modified_base 14: mod_base = OTHER; note = 5'-methyluridine-3'-phosphate
  modified_base 16: mod_base = OTHER; note = 5'-methyluridine-3'-phosphate
  modified_base 20: mod_base = OTHER; note = 5'-methyluridine-3'-phosphate
  modified_base 22: mod_base = OTHER; note = 5'-methyluridine-3'-phosphate
gatgggaaagcattgtaaatgtg

SEQ ID NO: 1811 - RNA, 23 nt, synthetic construct
  source 1..23: mol_type = other RNA
  modified_base 7: mod_base = OTHER; note = 5'-methyluridine-3'-phosphate
  modified_base 8: mod_base = OTHER; note = 5'-methyluridine-3'-phosphate
  modified_base 10: mod_base = OTHER; note = 5'-methyluridine-3'-phosphate
  modified_base 14: mod_base = OTHER; note = 5'-methyluridine-3'-phosphate
  modified_base 16: mod_base = OTHER; note = 5'-methyluridine-3'-phosphate
  modified_base 19: mod_base = OTHER; note = 5'-methyluridine-3'-phosphate
  modified_base 20: mod_base = OTHER; note = 5'-methyluridine-3'-phosphate
  modified_base 21: mod_base = OTHER; note = 5'-methyluridine-3'-phosphate
  modified_base 22: mod_base = OTHER; note = 5'-methyluridine-3'-phosphate
aaagcattgtaaatgtgctttta

SEQ ID NO: 1812 - RNA, 23 nt, synthetic construct
  source 1..23: mol_type = other RNA
  modified_base 2: mod_base = OTHER; note = 5'-methyluridine-3'-phosphate
  modified_base 5: mod_base = OTHER; note = 5'-methyluridine-3'-phosphate
  modified_base 8: mod_base = OTHER; note = 5'-methyluridine-3'-phosphate
  modified_base 10: mod_base = OTHER; note = 5'-methyluridine-3'-phosphate
  modified_base 11: mod_base = OTHER; note = 5'-methyluridine-3'-phosphate
  modified_base 14: mod_base = OTHER; note = 5'-methyluridine-3'-phosphate
  modified_base 17: mod_base = OTHER; note = 5'-methyluridine-3'-phosphate
atactgatgttcctagtgaaaga

SEQ ID NO: 1813 - RNA, 23 nt, synthetic construct
  source 1..23: mol_type = other RNA
  modified_base 2: mod_base = OTHER; note = 5'-methyluridine-3'-phosphate
  modified_base 4: mod_base = OTHER; note = 5'-methyluridine-3'-phosphate
  modified_base 5: mod_base = OTHER; note = 5'-methyluridine-3'-phosphate
  modified_base 8: mod_base = OTHER; note = 5'-methyluridine-3'-phosphate
  modified_base 11: mod_base = OTHER; note = 5'-methyluridine-3'-phosphate
atgttcctagtgaaagaggcagc

SEQ ID NO: 1814 - RNA, 23 nt, synthetic construct
  source 1..23: mol_type = other RNA
  modified_base 1: mod_base = OTHER; note = 5'-methyluridine-3'-phosphate
  modified_base 4: mod_base = OTHER; note = 5'-methyluridine-3'-phosphate
  modified_base 17: mod_base = OTHER; note = 5'-methyluridine-3'-phosphate
  modified_base 18: mod_base = OTHER; note = 5'-methyluridine-3'-phosphate
tagtgaaagaggcagcttgaaac

SEQ ID NO: 1815 - RNA, 23 nt, synthetic construct
  source 1..23: mol_type = other RNA
  modified_base 10: mod_base = OTHER; note = 5'-methyluridine-3'-phosphate
  modified_base 11: mod_base = OTHER; note = 5'-methyluridine-3'-phosphate
  modified_base 17: mod_base = OTHER; note = 5'-methyluridine-3'-phosphate
  modified_base 22: mod_base = OTHER; note = 5'-methyluridine-3'-phosphate
agaggcagcttgaaactgagatg

SEQ ID NO: 1816 - RNA, 23 nt, synthetic construct
  source 1..23: mol_type = other RNA
  modified_base 1: mod_base = OTHER; note = 5'-methyluridine-3'-phosphate
  modified_base 7: mod_base = OTHER; note = 5'-methyluridine-3'-phosphate
  modified_base 12: mod_base = OTHER; note = 5'-methyluridine-3'-phosphate
  modified_base 14: mod_base = OTHER; note = 5'-methyluridine-3'-phosphate
  modified_base 22: mod_base = OTHER; note = 5'-methyluridine-3'-phosphate
tgaaactgagatgtgaacacatc

SEQ ID NO: 1817 - RNA, 23 nt, synthetic construct
  source 1..23: mol_type = other RNA
  modified_base 1: mod_base = OTHER; note = 5'-methyluridine-3'-phosphate
  modified_base 6: mod_base = OTHER; note = 5'-methyluridine-3'-phosphate
  modified_base 8: mod_base = OTHER; note = 5'-methyluridine-3'-phosphate
  modified_base 16: mod_base = OTHER; note = 5'-methyluridine-3'-phosphate
  modified_base 21: mod_base = OTHER; note = 5'-methyluridine-3'-phosphate
  modified_base 22: mod_base = OTHER; note = 5'-methyluridine-3'-phosphate
tgagatgtgaacacatcagcttg

SEQ ID NO: 1818 - RNA, 23 nt, synthetic construct
  source 1..23: mol_type = other RNA
  modified_base 5: mod_base = OTHER; note = 5'-methyluridine-3'-phosphate
  modified_base 10: mod_base = OTHER; note = 5'-methyluridine-3'-phosphate
  modified_base 11: mod_base = OTHER; note = 5'-methyluridine-3'-phosphate
  modified_base 16: mod_base = OTHER; note = 5'-methyluridine-3'-phosphate
  modified_base 18: mod_base = OTHER; note = 5'-methyluridine-3'-phosphate
  modified_base 19: mod_base = OTHER; note = 5'-methyluridine-3'-phosphate
cacatcagcttgccctgttaaaa

SEQ ID NO: 1819 - RNA, 23 nt, synthetic construct
  source 1..23: mol_type = other RNA
  modified_base 4: mod_base = OTHER; note = 5'-methyluridine-3'-phosphate
  modified_base 5: mod_base = OTHER; note = 5'-methyluridine-3'-phosphate
  modified_base 10: mod_base = OTHER; note = 5'-methyluridine-3'-phosphate
  modified_base 12: mod_base = OTHER; note = 5'-methyluridine-3'-phosphate
  modified_base 13: mod_base = OTHER; note = 5'-methyluridine-3'-phosphate
  modified_base 20: mod_base = OTHER; note = 5'-methyluridine-3'-phosphate
agcttgccctgttaaaagatgaa

SEQ ID NO: 1820 - RNA, 23 nt, synthetic construct
  source 1..23: mol_type = other RNA
  modified_base 1: mod_base = OTHER; note = 5'-methyluridine-3'-phosphate
  modified_base 2: mod_base = OTHER; note = 5'-methyluridine-3'-phosphate
  modified_base 4: mod_base = OTHER; note = 5'-methyluridine-3'-phosphate
  modified_base 6: mod_base = OTHER; note = 5'-methyluridine-3'-phosphate
  modified_base 13: mod_base = OTHER; note = 5'-methyluridine-3'-phosphate
  modified_base 15: mod_base = OTHER; note = 5'-methyluridine-3'-phosphate
  modified_base 16: mod_base = OTHER; note = 5'-methyluridine-3'-phosphate
  modified_base 20: mod_base = OTHER; note = 5'-methyluridine-3'-phosphate
  modified_base 21: mod_base = OTHER; note = 5'-methyluridine-3'-phosphate
ttgtatcacaaatcttaacttga

SEQ ID NO: 1821 - RNA, 23 nt, synthetic construct
  source 1..23: mol_type = other RNA
  modified_base 6: mod_base = OTHER; note = 5'-methyluridine-3'-phosphate
  modified_base 8: mod_base = OTHER; note = 5'-methyluridine-3'-phosphate
  modified_base 9: mod_base = OTHER; note = 5'-methyluridine-3'-phosphate
  modified_base 13: mod_base = OTHER; note = 5'-methyluridine-3'-phosphate
  modified_base 14: mod_base = OTHER; note = 5'-methyluridine-3'-phosphate
  modified_base 22: mod_base = OTHER; note = 5'-methyluridine-3'-phosphate
acaaatcttaacttgaaggagtc

SEQ ID NO: 1822 - RNA, 23 nt, synthetic construct
  source 1..23: mol_type = other RNA
  modified_base 1: mod_base = OTHER; note = 5'-methyluridine-3'-phosphate
  modified_base 2: mod_base = OTHER; note = 5'-methyluridine-3'-phosphate
  modified_base 6: mod_base = OTHER; note = 5'-methyluridine-3'-phosphate
  modified_base 7: mod_base = OTHER; note = 5'-methyluridine-3'-phosphate
  modified_base 15: mod_base = OTHER; note = 5'-methyluridine-3'-phosphate
  modified_base 18: mod_base = OTHER; note = 5'-methyluridine-3'-phosphate
  modified_base 19: mod_base = OTHER; note = 5'-methyluridine-3'-phosphate
  modified_base 23: mod_base = OTHER; note = 5'-methyluridine
ttaacttgaaggagtccttgcat

SEQ ID NO: 1823 - RNA, 23 nt, synthetic construct
  source 1..23: mol_type = other RNA
  modified_base 1: mod_base = OTHER; note = 5'-methyluridine-3'-phosphate
  modified_base 9: mod_base = OTHER; note = 5'-methyluridine-3'-phosphate
  modified_base 12: mod_base = OTHER; note = 5'-methyluridine-3'-phosphate
  modified_base 13: mod_base = OTHER; note = 5'-methyluridine-3'-phosphate
  modified_base 17: mod_base = OTHER; note = 5'-methyluridine-3'-phosphate
  modified_base 21: mod_base = OTHER; note = 5'-methyluridine-3'-phosphate
  modified_base 22: mod_base = OTHER; note = 5'-methyluridine-3'-phosphate
  modified_base 23: mod_base = OTHER; note = 5'-methyluridine
tgaaggagtccttgcatcaattt

SEQ ID NO: 1824 - RNA, 23 nt, synthetic construct
  source 1..23: mol_type = other RNA
  modified_base 3: mod_base = OTHER; note = 5'-methyluridine-3'-phosphate
  modified_base 6: mod_base = OTHER; note = 5'-methyluridine-3'-phosphate
  modified_base 7: mod_base = OTHER; note = 5'-methyluridine-3'-phosphate
  modified_base 11: mod_base = OTHER; note = 5'-methyluridine-3'-phosphate
  modified_base 15: mod_base = OTHER; note = 5'-methyluridine-3'-phosphate
  modified_base 16: mod_base = OTHER; note = 5'-methyluridine-3'-phosphate
  modified_base 17: mod_base = OTHER; note = 5'-methyluridine-3'-phosphate
  modified_base 18: mod_base = OTHER; note = 5'-methyluridine-3'-phosphate
  modified_base 19: mod_base = OTHER; note = 5'-methyluridine-3'-phosphate
  modified_base 21: mod_base = OTHER; note = 5'-methyluridine-3'-phosphate
  modified_base 22: mod_base = OTHER; note = 5'-methyluridine-3'-phosphate
agtccttgcatcaatttttctta

SEQ ID NO: 1825 - RNA, 23 nt, synthetic construct
  source 1..23: mol_type = other RNA
  modified_base 1: mod_base = OTHER; note = 5'-methyluridine-3'-phosphate
  modified_base 3: mod_base = OTHER; note = 5'-methyluridine-3'-phosphate
  modified_base 4: mod_base = OTHER; note = 5'-methyluridine-3'-phosphate
  modified_base 6: mod_base = OTHER; note = 5'-methyluridine-3'-phosphate
  modified_base 7: mod_base = OTHER; note = 5'-methyluridine-3'-phosphate
  modified_base 8: mod_base = OTHER; note = 5'-methyluridine-3'-phosphate
  modified_base 11: mod_base = OTHER; note = 5'-methyluridine-3'-phosphate
  modified_base 12: mod_base = OTHER; note = 5'-methyluridine-3'-phosphate
  modified_base 13: mod_base = OTHER; note = 5'-methyluridine-3'-phosphate
  modified_base 15: mod_base = OTHER; note = 5'-methyluridine-3'-phosphate
  modified_base 16: mod_base = OTHER; note = 5'-methyluridine-3'-phosphate
  modified_base 17: mod_base = OTHER; note = 5'-methyluridine-3'-phosphate
  modified_base 21: mod_base = OTHER; note = 5'-methyluridine-3'-phosphate
  modified_base 23: mod_base = OTHER; note = 5'-methyluridine
tcttatttcatttctttgagtgt

SEQ ID NO: 1826 - RNA, 23 nt, synthetic construct
  source 1..23: mol_type = other RNA
  modified_base 1: mod_base = OTHER; note = 5'-methyluridine-3'-phosphate
  modified_base 4: mod_base = OTHER; note = 5'-methyluridine-3'-phosphate
  modified_base 5: mod_base = OTHER; note = 5'-methyluridine-3'-phosphate
  modified_base 6: mod_base = OTHER; note = 5'-methyluridine-3'-phosphate
  modified_base 8: mod_base = OTHER; note = 5'-methyluridine-3'-phosphate
  modified_base 9: mod_base = OTHER; note = 5'-methyluridine-3'-phosphate
  modified_base 10: mod_base = OTHER; note = 5'-methyluridine-3'-phosphate
  modified_base 14: mod_base = OTHER; note = 5'-methyluridine-3'-phosphate
  modified_base 16: mod_base = OTHER; note = 5'-methyluridine-3'-phosphate
  modified_base 18: mod_base = OTHER; note = 5'-methyluridine-3'-phosphate
  modified_base 19: mod_base = OTHER; note = 5'-methyluridine-3'-phosphate
  modified_base 22: mod_base = OTHER; note = 5'-methyluridine-3'-phosphate
  modified_base 23: mod_base = OTHER; note = 5'-methyluridine
tcatttctttgagtgtcttaatt

SEQ ID NO: 1827 - RNA, 23 nt, synthetic construct
  source 1..23: mol_type = other RNA
  modified_base 2: mod_base = OTHER; note = 5'-methyluridine-3'-phosphate
  modified_base 3: mod_base = OTHER; note = 5'-methyluridine-3'-phosphate
  modified_base 4: mod_base = OTHER; note = 5'-methyluridine-3'-phosphate
  modified_base 8: mod_base = OTHER; note = 5'-methyluridine-3'-phosphate
  modified_base 10: mod_base = OTHER; note = 5'-methyluridine-3'-phosphate
  modified_base 12: mod_base = OTHER; note = 5'-methyluridine-3'-phosphate
  modified_base 13: mod_base = OTHER; note = 5'-methyluridine-3'-phosphate
  modified_base 16: mod_base = OTHER; note = 5'-methyluridine-3'-phosphate
  modified_base 17: mod_base = OTHER; note = 5'-methyluridine-3'-phosphate
ctttgagtgtcttaattaaaaga

SEQ ID NO: 1828 - RNA, 23 nt, synthetic construct
  source 1..23: mol_type = other RNA
  modified_base 6: mod_base = OTHER; note = 5'-methyluridine-3'-phosphate
  modified_base 8: mod_base = OTHER; note = 5'-methyluridine-3'-phosphate
  modified_base 9: mod_base = OTHER; note = 5'-methyluridine-3'-phosphate
  modified_base 10: mod_base = OTHER; note = 5'-methyluridine-3'-phosphate
  modified_base 11: mod_base = OTHER; note = 5'-methyluridine-3'-phosphate
  modified_base 15: mod_base = OTHER; note = 5'-methyluridine-3'-phosphate
  modified_base 16: mod_base = OTHER; note = 5'-methyluridine-3'-phosphate
  modified_base 19: mod_base = OTHER; note = 5'-methyluridine-3'-phosphate
  modified_base 20: mod_base = OTHER; note = 5'-methyluridine-3'-phosphate
aagaatattttaacttccttgga

SEQ ID NO: 1829 - RNA, 23 nt, synthetic construct
  source 1..23: mol_type = other RNA
  modified_base 2: mod_base = OTHER; note = 5'-methyluridine-3'-phosphate
  modified_base 3: mod_base = OTHER; note = 5'-methyluridine-3'-phosphate
  modified_base 4: mod_base = OTHER; note = 5'-methyluridine-3'-phosphate
  modified_base 5: mod_base = OTHER; note = 5'-methyluridine-3'-phosphate
  modified_base 9: mod_base = OTHER; note = 5'-methyluridine-3'-phosphate
  modified_base 10: mod_base = OTHER; note = 5'-methyluridine-3'-phosphate
  modified_base 13: mod_base = OTHER; note = 5'-methyluridine-3'-phosphate
  modified_base 14: mod_base = OTHER; note = 5'-methyluridine-3'-phosphate
  modified_base 19: mod_base = OTHER; note = 5'-methyluridine-3'-phosphate
  modified_base 22: mod_base = OTHER; note = 5'-methyluridine-3'-phosphate
  modified_base 23: mod_base = OTHER; note = 5'-methyluridine
attttaacttccttggactcatt

SEQ ID NO: 1830 - RNA, 23 nt, synthetic construct
  source 1..23: mol_type = other RNA
  modified_base 3: mod_base = OTHER; note = 5'-methyluridine-3'-phosphate
  modified_base 4: mod_base = OTHER; note = 5'-methyluridine-3'-phosphate
  modified_base 7: mod_base = OTHER; note = 5'-methyluridine-3'-phosphate
  modified_base 8: mod_base = OTHER; note = 5'-methyluridine-3'-phosphate
  modified_base 13: mod_base = OTHER; note = 5'-methyluridine-3'-phosphate
  modified_base 16: mod_base = OTHER; note = 5'-methyluridine-3'-phosphate
  modified_base 17: mod_base = OTHER; note = 5'-methyluridine-3'-phosphate
  modified_base 18: mod_base = OTHER; note = 5'-methyluridine-3'-phosphate
  modified_base 19: mod_base = OTHER; note = 5'-methyluridine-3'-phosphate
acttccttggactcattttaaaa

SEQ ID NO: 1831 - RNA, 23 nt, synthetic construct
  source 1..23: mol_type = other RNA
  modified_base 1: mod_base = OTHER; note = 5'-methyluridine-3'-phosphate
  modified_base 3: mod_base = OTHER; note = 5'-methyluridine-3'-phosphate
  modified_base 5: mod_base = OTHER; note = 5'-methyluridine-3'-phosphate
  modified_base 6: mod_base = OTHER; note = 5'-methyluridine-3'-phosphate
  modified_base 8: mod_base = OTHER; note = 5'-methyluridine-3'-phosphate
  modified_base 9: mod_base = OTHER; note = 5'-methyluridine-3'-phosphate
  modified_base 11: mod_base = OTHER; note = 5'-methyluridine-3'-phosphate
  modified_base 12: mod_base = OTHER; note = 5'-methyluridine-3'-phosphate
  modified_base 17: mod_base = OTHER; note = 5'-methyluridine-3'-phosphate
  modified_base 18: mod_base = OTHER; note = 5'-methyluridine-3'-phosphate
  modified_base 20: mod_base = OTHER; note = 5'-methyluridine-3'-phosphate
tgtattattattcccattctaca

SEQ ID NO: 1832 - RNA, 23 nt, synthetic construct
  source 1..23: mol_type = other RNA
  modified_base 1: mod_base = OTHER; note = 5'-methyluridine-3'-phosphate
  modified_base 2: mod_base = OTHER; note = 5'-methyluridine-3'-phosphate
  modified_base 4: mod_base = OTHER; note = 5'-methyluridine-3'-phosphate
  modified_base 5: mod_base = OTHER; note = 5'-methyluridine-3'-phosphate
  modified_base 10: mod_base = OTHER; note = 5'-methyluridine-3'-phosphate
  modified_base 11: mod_base = OTHER; note = 5'-methyluridine-3'-phosphate
  modified_base 13: mod_base = OTHER; note = 5'-methyluridine-3'-phosphate
  modified_base 17: mod_base = OTHER; note = 5'-methyluridine-3'-phosphate
  modified_base 20: mod_base = OTHER; note = 5'-methyluridine-3'-phosphate
  modified_base 22: mod_base = OTHER; note = 5'-methyluridine-3'-phosphate
ttattcccattctacatactatg

SEQ ID NO: 1833 - RNA, 23 nt, synthetic construct
  source 1..23: mol_type = other RNA
  modified_base 1: mod_base = OTHER; note = 5'-methyluridine-3'-phosphate
  modified_base 2: mod_base = OTHER; note = 5'-methyluridine-3'-phosphate
  modified_base 4: mod_base = OTHER; note = 5'-methyluridine-3'-phosphate
  modified_base 8: mod_base = OTHER; note = 5'-methyluridine-3'-phosphate
  modified_base 11: mod_base = OTHER; note = 5'-methyluridine-3'-phosphate
  modified_base 13: mod_base = OTHER; note = 5'-methyluridine-3'-phosphate
  modified_base 18: mod_base = OTHER; note = 5'-methyluridine-3'-phosphate
  modified_base 19: mod_base = OTHER; note = 5'-methyluridine-3'-phosphate
  modified_base 20: mod_base = OTHER; note = 5'-methyluridine-3'-phosphate
  modified_base 22: mod_base = OTHER; note = 5'-methyluridine-3'-phosphate
ttctacatactatggaatttctc

SEQ ID NO: 1834 - RNA, 23 nt, synthetic construct
  source 1..23: mol_type = other RNA
  modified_base 1: mod_base = OTHER; note = 5'-methyluridine-3'-phosphate
  modified_base 3: mod_base = OTHER; note = 5'-methyluridine-3'-phosphate
  modified_base 8: mod_base = OTHER; note = 5'-methyluridine-3'-phosphate
  modified_base 9: mod_base = OTHER; note = 5'-methyluridine-3'-phosphate
  modified_base 10: mod_base = OTHER; note = 5'-methyluridine-3'-phosphate
  modified_base 12: mod_base = OTHER; note = 5'-methyluridine-3'-phosphate
  modified_base 18: mod_base = OTHER; note = 5'-methyluridine-3'-phosphate
  modified_base 21: mod_base = OTHER; note = 5'-methyluridine-3'-phosphate
  modified_base 22: mod_base = OTHER; note = 5'-methyluridine-3'-phosphate
  modified_base 23: mod_base = OTHER; note = 5'-methyluridine
tatggaatttctcccagtcattt

SEQ ID NO: 1835 - RNA, 23 nt, synthetic construct
  source 1..23: mol_type = other RNA
  modified_base 2: mod_base = OTHER; note = 5'-methyluridine-3'-phosphate
  modified_base 8: mod_base = OTHER; note = 5'-methyluridine-3'-phosphate
  modified_base 11: mod_base = OTHER; note = 5'-methyluridine-3'-phosphate
  modified_base 12: mod_base = OTHER; note = 5'-methyluridine-3'-phosphate
  modified_base 13: mod_base = OTHER; note = 5'-methyluridine-3'-phosphate
  modified_base 16: mod_base = OTHER; note = 5'-methyluridine-3'-phosphate
  modified_base 20: mod_base = OTHER; note = 5'-methyluridine-3'-phosphate
  modified_base 22: mod_base = OTHER; note = 5'-methyluridine-3'-phosphate
ctcccagtcatttaataaatgtg

SEQ ID NO: 1836 - RNA, 23 nt, synthetic construct
  source 1..23: mol_type = other RNA
  modified_base 2: mod_base = OTHER; note = 5'-methyluridine-3'-phosphate
  modified_base 5: mod_base = OTHER; note = 5'-methyluridine-3'-phosphate
  modified_base 6: mod_base = OTHER; note = 5'-methyluridine-3'-phosphate
  modified_base 7: mod_base = OTHER; note = 5'-methyluridine-3'-phosphate
  modified_base 10: mod_base = OTHER; note = 5'-methyluridine-3'-phosphate
  modified_base 14: mod_base = OTHER; note = 5'-methyluridine-3'-phosphate
  modified_base 16: mod_base = OTHER; note = 5'-methyluridine-3'-phosphate
  modified_base 20: mod_base = OTHER; note = 5'-methyluridine-3'-phosphate
  modified_base 21: mod_base = OTHER; note = 5'-methyluridine-3'-phosphate
gtcatttaataaatgtgccttca

SEQ ID NO: 1837 - RNA, 21 nt, synthetic construct
  source 1..21: mol_type = other RNA
aatgtgcaatgtctcttttaa

SEQ ID NO: 1838 - RNA, 21 nt, synthetic construct
  source 1..21: mol_type = other RNA
tgtgcaatgtctcttttagca

SEQ ID NO: 1839 - RNA, 21 nt, synthetic construct
  source 1..21: mol_type = other RNA
tgcaatgtctcttttagcaaa

SEQ ID NO: 1840 - RNA, 21 nt, synthetic construct
  source 1..21: mol_type = other RNA
ctccaaacaacacgtttctaa

SEQ ID NO: 1841 - RNA, 21 nt, synthetic construct
  source 1..21: mol_type = other RNA
tccaaacaacacgtttctaga

SEQ ID NO: 1842 - RNA, 21 nt, synthetic construct
  source 1..21: mol_type = other RNA
gtgaatccaactgtaaagtta

SEQ ID NO: 1843 - RNA, 21 nt, synthetic construct
  source 1..21: mol_type = other RNA
atccaactgtaaagttcttta

SEQ ID NO: 1844 - RNA, 21 nt, synthetic construct
  source 1..21: mol_type = other RNA
tccaactgtaaagttctttaa

SEQ ID NO: 1845 - RNA, 21 nt, synthetic construct
  source 1..21: mol_type = other RNA
ccaactgtaaagttctttata

SEQ ID NO: 1846 - RNA, 21 nt, synthetic construct
  source 1..21: mol_type = other RNA
caactgtaaagttctttatta

SEQ ID NO: 1847 - RNA, 21 nt, synthetic construct
  source 1..21: mol_type = other RNA
aactgtaaagttctttattga

SEQ ID NO: 1848 - RNA, 21 nt, synthetic construct
  source 1..21: mol_type = other RNA
gaggaagaaatctctataaaa

SEQ ID NO: 1849 - RNA, 21 nt, synthetic construct
  source 1..21: mol_type = other RNA
ggaagttgaagatcaaattga

SEQ ID NO: 1850 - RNA, 21 nt, synthetic construct
  source 1..21: mol_type = other RNA
gaagttgaagatcaaattgaa

SEQ ID NO: 1851 - RNA, 21 nt, synthetic construct
  source 1..21: mol_type = other RNA
aagttgaagatcaaattgaaa

SEQ ID NO: 1852 - RNA, 21 nt, synthetic construct
  source 1..21: mol_type = other RNA
aagaccacatttgttctcata

SEQ ID NO: 1853 - RNA, 21 nt, synthetic construct
  source 1..21: mol_type = other RNA
tgttctcattatctcaaaaga

SEQ ID NO: 1854 - RNA, 21 nt, synthetic construct
  source 1..21: mol_type = other RNA
gttctcattatctcaaaagta

SEQ ID NO: 1855 - RNA, 21 nt, synthetic construct
  source 1..21: mol_type = other RNA
ttctcattatctcaaaagtga

SEQ ID NO: 1856 - RNA, 21 nt, synthetic construct
  source 1..21: mol_type = other RNA
ctgctttctccagttttacaa

SEQ ID NO: 1857 - RNA, 21 nt, synthetic construct
  source 1..21: mol_type = other RNA
ttagagcaatttggattttca

SEQ ID NO: 1858 - RNA, 21 nt, synthetic construct
  source 1..21: mol_type = other RNA
ttctgagaaagactattcaaa

SEQ ID NO: 1859 - RNA, 21 nt, synthetic construct
  source 1..21: mol_type = other RNA
ttatgtcttgaatcaaactta

SEQ ID NO: 1860 - RNA, 21 nt, synthetic construct
  source 1..21: mol_type = other RNA
gacacatttgttcaaaggtta

SEQ ID NO: 1861 - RNA, 21 nt, synthetic construct
  source 1..21: mol_type = other RNA
ttgttcaaaggttcttgttta

SEQ ID NO: 1862 - RNA, 21 nt, synthetic construct
  source 1..21: mol_type = other RNA
tgttcaaaggttcttgtttaa

SEQ ID NO: 1863 - RNA, 21 nt, synthetic construct
  source 1..21: mol_type = other RNA
gttcaaaggttcttgtttaaa

SEQ ID NO: 1864 - RNA, 21 nt, synthetic construct
  source 1..21: mol_type = other RNA
tcaaaggttcttgtttaacta

SEQ ID NO: 1865 - RNA, 21 nt, synthetic construct
  source 1..21: mol_type = other RNA
ggttcttgtttaacttgttaa

SEQ ID NO: 1866 - RNA, 21 nt, synthetic construct
  source 1..21: mol_type = other RNA
gttcttgtttaacttgttaga

SEQ ID NO: 1867 - RNA, 21 nt, synthetic construct
  source 1..21: mol_type = other RNA
ttcttgtttaacttgttagaa

SEQ ID NO: 1868 - RNA, 21 nt, synthetic construct
  source 1..21: mol_type = other RNA
gctttggagaaatcaattaaa

SEQ ID NO: 1869 - RNA, 21 nt, synthetic construct
  source 1..21: mol_type = other RNA
ctttggagaaatcaattaaca

SEQ ID NO: 1870 - RNA, 21 nt, synthetic construct
  source 1..21: mol_type = other RNA
tttggagaaatcaattaacaa

SEQ ID NO: 1871 - RNA, 21 nt, synthetic construct
  source 1..21: mol_type = other RNA
ttggagaaatcaattaacaaa

SEQ ID NO: 1872 - RNA, 21 nt, synthetic construct
  source 1..21: mol_type = other RNA
ccagggttttctgtattgtta

SEQ ID NO: 1873 - RNA, 21 nt, synthetic construct
  source 1..21: mol_type = other RNA
cagggttttctgtattgttta

SEQ ID NO: 1874 - RNA, 21 nt, synthetic construct
  source 1..21: mol_type = other RNA
tagcaatgtttggataactta

SEQ ID NO: 1875 - RNA, 21 nt, synthetic construct
  source 1..21: mol_type = other RNA
aatggacttcacacatttaaa

SEQ ID NO: 1876 - RNA, 21 nt, synthetic construct
  source 1..21: mol_type = other RNA
atggacttcacacatttaaaa

SEQ ID NO: 1877 - RNA, 21 nt, synthetic construct
  source 1..21: mol_type = other RNA
tgtgttccttttgtttctaaa

SEQ ID NO: 1878 - RNA, 21 nt, synthetic construct
  source 1..21: mol_type = other RNA
cgtaagagttgtgaattagaa

SEQ ID NO: 1879 - RNA, 21 nt, synthetic construct
  source 1..21: mol_type = other RNA
tgaactcaagagtaagtttga

SEQ ID NO: 1880 - RNA, 21 nt, synthetic construct
  source 1..21: mol_type = other RNA
gaactcaagagtaagtttgaa

SEQ ID NO: 1881 - RNA, 21 nt, synthetic construct
  source 1..21: mol_type = other RNA
actcaagagtaagtttgaaaa

SEQ ID NO: 1882 - RNA, 23 nt, synthetic construct
  source 1..23: mol_type = other RNA
ttaaaagagacattgcacattga

SEQ ID NO: 1883 - RNA, 23 nt, synthetic construct
  source 1..23: mol_type = other RNA
tgctaaaagagacattgcacatt

SEQ ID NO: 1884 - RNA, 23 nt, synthetic construct
  source 1..23: mol_type = other RNA
tttgctaaaagagacattgcaca

SEQ ID NO: 1885 - RNA, 23 nt, synthetic construct
  source 1..23: mol_type = other RNA
ttagaaacgtgttgtttggagac

SEQ ID NO: 1886 - RNA, 23 nt, synthetic construct
  source 1..23: mol_type = other RNA
tctagaaacgtgttgtttggaga

SEQ ID NO: 1887 - RNA, 23 nt, synthetic construct
  source 1..23: mol_type = other RNA
taactttacagttggattcacag

SEQ ID NO: 1888 - RNA, 23 nt, synthetic construct
  source 1..23: mol_type = other RNA
taaagaactttacagttggattc

SEQ ID NO: 1889 - RNA, 23 nt, synthetic construct
  source 1..23: mol_type = other RNA
ttaaagaactttacagttggatt

SEQ ID NO: 1890 - RNA, 23 nt, synthetic construct
  source 1..23: mol_type = other RNA
tataaagaactttacagttggat

SEQ ID NO: 1891 - RNA, 23 nt, synthetic construct
  source 1..23: mol_type = other RNA
taataaagaactttacagttgga

SEQ ID NO: 1892 - RNA, 23 nt, synthetic construct
  source 1..23: mol_type = other RNA
tcaataaagaactttacagttgg

SEQ ID NO: 1893 - RNA, 23 nt, synthetic construct
  source 1..23: mol_type = other RNA
ttttatagagatttcttcctcct

SEQ ID NO: 1894 - RNA, 23 nt, synthetic construct
  source 1..23: mol_type = other RNA
tcaatttgatcttcaacttccag

SEQ ID NO: 1895 - RNA, 23 nt, synthetic construct
  source 1..23: mol_type = other RNA
ttcaatttgatcttcaacttcca

SEQ ID NO: 1896 - RNA, 23 nt, synthetic construct
  source 1..23: mol_type = other RNA
tttcaatttgatcttcaacttcc

SEQ ID NO: 1897 - RNA, 23 nt, synthetic construct
  source 1..23: mol_type = other RNA
tatgagaacaaatgtggtcttaa

SEQ ID NO: 1898 - RNA, 23 nt, synthetic construct
  source 1..23: mol_type = other RNA
tcttttgagataatgagaacaaa

SEQ ID NO: 1899 - RNA, 23 nt, synthetic construct
  source 1..23: mol_type = other RNA
tacttttgagataatgagaacaa

SEQ ID NO: 1900 - RNA, 23 nt, synthetic construct
  source 1..23: mol_type = other RNA
tcacttttgagataatgagaaca

SEQ ID NO: 1901 - RNA, 23 nt, synthetic construct
  source 1..23: mol_type = other RNA
ttgtaaaactggagaaagcagcc

SEQ ID NO: 1902 - RNA, 23 nt, synthetic construct
  source 1..23: mol_type = other RNA
tgaaaatccaaattgctctaagg

SEQ ID NO: 1903 - RNA, 23 nt, synthetic construct
  source 1..23: mol_type = other RNA
tttgaatagtctttctcagaaaa

SEQ ID NO: 1904 - RNA, 23 nt, synthetic construct
  source 1..23: mol_type = other RNA
taagtttgattcaagacataacc

SEQ ID NO: 1905 - RNA, 23 nt, synthetic construct
  source 1..23: mol_type = other RNA
taacctttgaacaaatgtgtcca

SEQ ID NO: 1906 - RNA, 23 nt, synthetic construct
  source 1..23: mol_type = other RNA
taaacaagaacctttgaacaaat

SEQ ID NO: 1907 - RNA, 23 nt, synthetic construct
  source 1..23: mol_type = other RNA
ttaaacaagaacctttgaacaaa

SEQ ID NO: 1908 - RNA, 23 nt, synthetic construct
  source 1..23: mol_type = other RNA
tttaaacaagaacctttgaacaa

SEQ ID NO: 1909 - RNA, 23 nt, synthetic construct
  source 1..23: mol_type = other RNA
tagttaaacaagaacctttgaac

SEQ ID NO: 1910 - RNA, 23 nt, synthetic construct
  source 1..23: mol_type = other RNA
ttaacaagttaaacaagaacctt

SEQ ID NO: 1911 - RNA, 23 nt, synthetic construct
  source 1..23: mol_type = other RNA
tctaacaagttaaacaagaacct

SEQ ID NO: 1912 - RNA, 23 nt, synthetic construct
  source 1..23: mol_type = other RNA
ttctaacaagttaaacaagaacc

SEQ ID NO: 1913 - RNA, 23 nt, synthetic construct
  source 1..23: mol_type = other RNA
tttaattgatttctccaaagcta

SEQ ID NO: 1914 - RNA, 23 nt, synthetic construct
  source 1..23: mol_type = other RNA
tgttaattgatttctccaaagct

SEQ ID NO: 1915 - RNA, 23 nt, synthetic construct
  source 1..23: mol_type = other RNA
ttgttaattgatttctccaaagc

SEQ ID NO: 1916 - RNA, 23 nt, synthetic construct
  source 1..23: mol_type = other RNA
tttgttaattgatttctccaaag

SEQ ID NO: 1917 - RNA, 23 nt, synthetic construct
  source 1..23: mol_type = other RNA
taacaatacagaaaaccctggaa

SEQ ID NO: 1918 - RNA, 23 nt, synthetic construct
  source 1..23: mol_type = other RNA
taaacaatacagaaaaccctgga

SEQ ID NO: 1919 - RNA, 23 nt, synthetic construct
  source 1..23: mol_type = other RNA
taagttatccaaacattgctaag

SEQ ID NO: 1920 - RNA, 23 nt, synthetic construct
  source 1..23: mol_type = other RNA
tttaaatgtgtgaagtccatttt

SEQ ID NO: 1921 - RNA, 23 nt, synthetic construct
  source 1..23: mol_type = other RNA
ttttaaatgtgtgaagtccattt

SEQ ID NO: 1922 - RNA, 23 nt, synthetic construct
  source 1..23: mol_type = other RNA
tttagaaacaaaaggaacacaaa

SEQ ID NO: 1923 - RNA, 23 nt, synthetic construct
  source 1..23: mol_type = other RNA
ttctaattcacaactcttacgga

SEQ ID NO: 1924 - RNA, 23 nt, synthetic construct
  source 1..23: mol_type = other RNA
tcaaacttactcttgagttcact

SEQ ID NO: 1925 - RNA, 23 nt, synthetic construct
  source 1..23: mol_type = other RNA
ttcaaacttactcttgagttcac

SEQ ID NO: 1926 - RNA, 23 nt, synthetic construct
  source 1..23: mol_type = other RNA
ttttcaaacttactcttgagttc

SEQ ID NO: 1927 - RNA, 21 nt, synthetic construct
  source 1..21: mol_type = other RNA
  modified_base 1: mod_base = OTHER; note = 2'-O-methyladenosine-3'-phosphorothioate
  modified_base 2: mod_base = OTHER; note = 2'-O-methyladenosine-3'-phosphorothioate
  modified_base 3: mod_base = OTHER; note = 2'-O-methyluridine-3'-phosphate
  modified_base 4: mod_base = OTHER; note = 2'-O-methylguanosine-3'-phosphate
  modified_base 5: mod_base = OTHER; note = 2'-O-methyluridine-3'-phosphate
  modified_base 6: mod_base = OTHER; note = 2'-O-methylguanosine-3'-phosphate
  modified_base 7: mod_base = OTHER; note = 2'-deoxy-2'-fluorocytidine-3'-phosphate
  modified_base 8: mod_base = OTHER; note = 2'-O-methyladenosine-3'-phosphate
  modified_base 9: mod_base = OTHER; note = 2'-deoxy-2'-fluoroadenosine-3'-phosphate
  modified_base 10: mod_base = OTHER; note = 2'-deoxy-2'-fluorouridine-3'-phosphate
  modified_base 11: mod_base = OTHER; note = 2'-deoxy-2'-fluoroguanosine-3'-phosphate
  modified_base 12: mod_base = OTHER; note = 2'-O-methyluridine-3'-phosphate
  modified_base 13: mod_base = OTHER; note = 2'-O-methylcytidine-3'-phosphate
  modified_base 14: mod_base = OTHER; note = 2'-O-methyluridine-3'-phosphate
  modified_base 15: mod_base = OTHER; note = 2'-O-methylcytidine-3'-phosphate
  modified_base 16: mod_base = OTHER; note = 2'-O-methyluridine-3'-phosphate
  modified_base 17: mod_base = OTHER; note = 2'-O-methyluridine-3'-phosphate
  modified_base 18: mod_base = OTHER; note = 2'-O-methyluridine-3'-phosphate
  modified_base 19: mod_base = OTHER; note = 2'-O-methyluridine-3'-phosphate
  modified_base 20: mod_base = OTHER; note = 2'-O-methyladenosine-3'-phosphate
  modified_base 21: mod_base = OTHER; note = 2'-O-methyladenosine-3'-phosphate ((2S,4R)-1-[29-[[2-(acetylamino)-2-deoxy-beta-D-galactopyra nosyl]oxy]-14,14-bis[[3-[[3-[[5-[[2-(acetylamino)-2-deoxy-b eta-D-galactopyranosyl]oxy]-1-oxopentyl]amino]propyl]amino] -3-oxopropoxy]methyl]-1,12,19,25-tetraoxo-16-oxa-13,20,24-t riazanonacos-1-yl]-4-hydroxy-2-pyrrolidinyl)methyl ester
aatgtgcaatgtctcttttaa

SEQ ID NO: 1928 - RNA, 21 nt, synthetic construct
  source 1..21: mol_type = other RNA
  modified_base 1: mod_base = OTHER; note = 2'-O-methyluridine-3'-phosphorothioate
  modified_base 2: mod_base = OTHER; note = 2'-O-methylguanosine-3'-phosphorothioate
  modified_base 3: mod_base = OTHER; note = 2'-O-methyluridine-3'-phosphate
  modified_base 4: mod_base = OTHER; note = 2'-O-methylguanosine-3'-phosphate
  modified_base 5: mod_base = OTHER; note = 2'-O-methylcytidine-3'-phosphate
  modified_base 6: mod_base = OTHER; note = 2'-O-methyladenosine-3'-phosphate
  modified_base 7: mod_base = OTHER; note = 2'-deoxy-2'-fluoroadenosine-3'-phosphate
  modified_base 8: mod_base = OTHER; note = 2'-O-methyluridine-3'-phosphate
  modified_base 9: mod_base = OTHER; note = 2'-deoxy-2'-fluoroguanosine-3'-phosphate
  modified_base 10: mod_base = OTHER; note = 2'-deoxy-2'-fluorouridine-3'-phosphate
  modified_base 11: mod_base = OTHER; note = 2'-deoxy-2'-fluorocytidine-3'-phosphate
  modified_base 12: mod_base = OTHER; note = 2'-O-methyluridine-3'-phosphate
  modified_base 13: mod_base = OTHER; note = 2'-O-methylcytidine-3'-phosphate
  modified_base 14: mod_base = OTHER; note = 2'-O-methyluridine-3'-phosphate
  modified_base 15: mod_base = OTHER; note = 2'-O-methyluridine-3'-phosphate
  modified_base 16: mod_base = OTHER; note = 2'-O-methyluridine-3'-phosphate
  modified_base 17: mod_base = OTHER; note = 2'-O-methyluridine-3'-phosphate
  modified_base 18: mod_base = OTHER; note = 2'-O-methyladenosine-3'-phosphate
  modified_base 19: mod_base = OTHER; note = 2'-O-methylguanosine-3'-phosphate
  modified_base 20: mod_base = OTHER; note = 2'-O-methylcytidine-3'-phosphate
  modified_base 21: mod_base = OTHER; note = 2'-O-methyladenosine-3'-phosphate ((2S,4R)-1-[29-[[2-(acetylamino)-2-deoxy-beta-D-galactopyra nosyl]oxy]-14,14-bis[[3-[[3-[[5-[[2-(acetylamino)-2-deoxy-b eta-D-galactopyranosyl]oxy]-1-oxopentyl]amino]propyl]amino] -3-oxopropoxy]methyl]-1,12,19,25-tetraoxo-16-oxa-13,20,24-t riazanonacos-1-yl]-4-hydroxy-2-pyrrolidinyl)methyl ester
tgtgcaatgtctcttttagca

SEQ ID NO: 1929 - RNA, 21 nt, synthetic construct
  source 1..21: mol_type = other RNA
  modified_base 1: mod_base = OTHER; note = 2'-O-methyluridine-3'-phosphorothioate
  modified_base 2: mod_base = OTHER; note = 2'-O-methylguanosine-3'-phosphorothioate
  modified_base 3: mod_base = OTHER; note = 2'-O-methylcytidine-3'-phosphate
  modified_base 4: mod_base = OTHER; note = 2'-O-methyladenosine-3'-phosphate
  modified_base 5: mod_base = OTHER; note = 2'-O-methyladenosine-3'-phosphate
  modified_base 6: mod_base = OTHER; note = 2'-O-methyluridine-3'-phosphate
  modified_base 7: mod_base = OTHER; note = 2'-deoxy-2'-fluoroguanosine-3'-phosphate
  modified_base 8: mod_base = OTHER; note = 2'-O-methyluridine-3'-phosphate
  modified_base 9: mod_base = OTHER; note = 2'-deoxy-2'-fluorocytidine-3'-phosphate
  modified_base 10: mod_base = OTHER; note = 2'-deoxy-2'-fluorouridine-3'-phosphate
  modified_base 11: mod_base = OTHER; note = 2'-deoxy-2'-fluorocytidine-3'-phosphate
  modified_base 12: mod_base = OTHER; note = 2'-O-methyluridine-3'-phosphate
  modified_base 13: mod_base = OTHER; note = 2'-O-methyluridine-3'-phosphate
  modified_base 14: mod_base = OTHER; note = 2'-O-methyluridine-3'-phosphate
  modified_base 15: mod_base = OTHER; note = 2'-O-methyluridine-3'-phosphate
  modified_base 16: mod_base = OTHER; note = 2'-O-methyladenosine-3'-phosphate
  modified_base 17: mod_base = OTHER; note = 2'-O-methylguanosine-3'-phosphate
  modified_base 18: mod_base = OTHER; note = 2'-O-methylcytidine-3'-phosphate
  modified_base 19: mod_base = OTHER; note = 2'-O-methyladenosine-3'-phosphate
  modified_base 20: mod_base = OTHER; note = 2'-O-methyladenosine-3'-phosphate
  modified_base 21: mod_base = OTHER; note = 2'-O-methyladenosine-3'-phosphate ((2S,4R)-1-[29-[[2-(acetylamino)-2-deoxy-beta-D-galactopyra nosyl]oxy]-14,14-bis[[3-[[3-[[5-[[2-(acetylamino)-2-deoxy-b eta-D-galactopyranosyl]oxy]-1-oxopentyl]amino]propyl]amino] -3-oxopropoxy]methyl]-1,12,19,25-tetraoxo-16-oxa-13,20,24-t riazanonacos-1-yl]-4-hydroxy-2-pyrrolidinyl)methyl ester
tgcaatgtctcttttagcaaa

SEQ ID NO: 1930 - RNA, 21 nt, synthetic construct
  source 1..21: mol_type = other RNA
  modified_base 1: mod_base = OTHER; note = 2'-O-methylcytidine-3'-phosphorothioate
  modified_base 2: mod_base = OTHER; note = 2'-O-methyluridine-3'-phosphorothioate
  modified_base 3: mod_base = OTHER; note = 2'-O-methylcytidine-3'-phosphate
  modified_base 4: mod_base = OTHER; note = 2'-O-methylcytidine-3'-phosphate
  modified_base 5: mod_base = OTHER; note = 2'-O-methyladenosine-3'-phosphate
  modified_base 6: mod_base = OTHER; note = 2'-O-methyladenosine-3'-phosphate
  modified_base 7: mod_base = OTHER; note = 2'-deoxy-2'-fluoroadenosine-3'-phosphate
  modified_base 8: mod_base = OTHER; note = 2'-O-methylcytidine-3'-phosphate
  modified_base 9: mod_base = OTHER; note = 2'-deoxy-2'-fluoroadenosine-3'-phosphate
  modified_base 10: mod_base = OTHER; note = 2'-deoxy-2'-fluoroadenosine-3'-phosphate
  modified_base 11: mod_base = OTHER; note = 2'-deoxy-2'-fluorocytidine-3'-phosphate
  modified_base 12: mod_base = OTHER; note = 2'-O-methyladenosine-3'-phosphate
  modified_base 13: mod_base = OTHER; note = 2'-O-methylcytidine-3'-phosphate
  modified_base 14: mod_base = OTHER; note = 2'-O-methylguanosine-3'-phosphate
  modified_base 15: mod_base = OTHER; note = 2'-O-methyluridine-3'-phosphate
  modified_base 16: mod_base = OTHER; note = 2'-O-methyluridine-3'-phosphate
  modified_base 17: mod_base = OTHER; note = 2'-O-methyluridine-3'-phosphate
  modified_base 18: mod_base = OTHER; note = 2'-O-methylcytidine-3'-phosphate
  modified_base 19: mod_base = OTHER; note = 2'-O-methyluridine-3'-phosphate
  modified_base 20: mod_base = OTHER; note = 2'-O-methyladenosine-3'-phosphate
  modified_base 21: mod_base = OTHER; note = 2'-O-methyladenosine-3'-phosphate ((2S,4R)-1-[29-[[2-(acetylamino)-2-deoxy-beta-D-galactopyra nosyl]oxy]-14,14-bis[[3-[[3-[[5-[[2-(acetylamino)-2-deoxy-b eta-D-galactopyranosyl]oxy]-1-oxopentyl]amino]propyl]amino] -3-oxopropoxy]methyl]-1,12,19,25-tetraoxo-16-oxa-13,20,24-t riazanonacos-1-yl]-4-hydroxy-2-pyrrolidinyl)methyl ester
ctccaaacaacacgtttctaa

SEQ ID NO: 1931 - RNA, 21 nt, synthetic construct
  source 1..21: mol_type = other RNA
  modified_base 1: mod_base = OTHER; note = 2'-O-methyluridine-3'-phosphorothioate
  modified_base 2: mod_base = OTHER; note = 2'-O-methylcytidine-3'-phosphorothioate
  modified_base 3: mod_base = OTHER; note = 2'-O-methylcytidine-3'-phosphate
  modified_base 4: mod_base = OTHER; note = 2'-O-methyladenosine-3'-phosphate
  modified_base 5: mod_base = OTHER; note = 2'-O-methyladenosine-3'-phosphate
  modified_base 6: mod_base = OTHER; note = 2'-O-methyladenosine-3'-phosphate
  modified_base 7: mod_base = OTHER; note = 2'-deoxy-2'-fluorocytidine-3'-phosphate
  modified_base 8: mod_base = OTHER; note = 2'-O-methyladenosine-3'-phosphate
  modified_base 9: mod_base = OTHER; note = 2'-deoxy-2'-fluoroadenosine-3'-phosphate
  modified_base 10: mod_base = OTHER; note = 2'-deoxy-2'-fluorocytidine-3'-phosphate
  modified_base 11: mod_base = OTHER; note = 2'-deoxy-2'-fluoroadenosine-3'-phosphate
  modified_base 12: mod_base = OTHER; note = 2'-O-methylcytidine-3'-phosphate
  modified_base 13: mod_base = OTHER; note = 2'-O-methylguanosine-3'-phosphate
  modified_base 14: mod_base = OTHER; note = 2'-O-methyluridine-3'-phosphate
  modified_base 15: mod_base = OTHER; note = 2'-O-methyluridine-3'-phosphate
  modified_base 16: mod_base = OTHER; note = 2'-O-methyluridine-3'-phosphate
  modified_base 17: mod_base = OTHER; note = 2'-O-methylcytidine-3'-phosphate
  modified_base 18: mod_base = OTHER; note = 2'-O-methyluridine-3'-phosphate
  modified_base 19: mod_base = OTHER; note = 2'-O-methyladenosine-3'-phosphate
  modified_base 20: mod_base = OTHER; note = 2'-O-methylguanosine-3'-phosphate
  modified_base 21: mod_base = OTHER; note = 2'-O-methyladenosine-3'-phosphate ((2S,4R)-1-[29-[[2-(acetylamino)-2-deoxy-beta-D-galactopyra nosyl]oxy]-14,14-bis[[3-[[3-[[5-[[2-(acetylamino)-2-deoxy-b eta-D-galactopyranosyl]oxy]-1-oxopentyl]amino]propyl]amino] -3-oxopropoxy]methyl]-1,12,19,25-tetraoxo-16-oxa-13,20,24-t riazanonacos-1-yl]-4-hydroxy-2-pyrrolidinyl)methyl ester
tccaaacaacacgtttctaga

SEQ ID NO: 1932 - RNA, 21 nt, synthetic construct
  source 1..21: mol_type = other RNA
  modified_base 1: mod_base = OTHER; note = 2'-O-methylguanosine-3'-phosphorothioate
  modified_base 2: mod_base = OTHER; note = 2'-O-methyluridine-3'-phosphorothioate
  modified_base 3: mod_base = OTHER; note = 2'-O-methylguanosine-3'-phosphate
  modified_base 4: mod_base = OTHER; note = 2'-O-methyladenosine-3'-phosphate
  modified_base 5: mod_base = OTHER; note = 2'-O-methyladenosine-3'-phosphate
  modified_base 6: mod_base = OTHER; note = 2'-O-methyluridine-3'-phosphate
  modified_base 7: mod_base = OTHER; note = 2'-deoxy-2'-fluorocytidine-3'-phosphate
  modified_base 8: mod_base = OTHER; note = 2'-O-methylcytidine-3'-phosphate
  modified_base 9: mod_base = OTHER; note = 2'-deoxy-2'-fluoroadenosine-3'-phosphate
  modified_base 10: mod_base = OTHER; note = 2'-deoxy-2'-fluoroadenosine-3'-phosphate
  modified_base 11: mod_base = OTHER; note = 2'-deoxy-2'-fluorocytidine-3'-phosphate
  modified_base 12: mod_base = OTHER; note = 2'-O-methyluridine-3'-phosphate
  modified_base 13: mod_base = OTHER; note = 2'-O-methylguanosine-3'-phosphate
  modified_base 14: mod_base = OTHER; note = 2'-O-methyluridine-3'-phosphate
  modified_base 15: mod_base = OTHER; note = 2'-O-methyladenosine-3'-phosphate
  modified_base 16: mod_base = OTHER; note = 2'-O-methyladenosine-3'-phosphate
  modified_base 17: mod_base = OTHER; note = 2'-O-methyladenosine-3'-phosphate
  modified_base 18: mod_base = OTHER; note = 2'-O-methylguanosine-3'-phosphate
  modified_base 19: mod_base = OTHER; note = 2'-O-methyluridine-3'-phosphate
  modified_base 20: mod_base = OTHER; note = 2'-O-methyluridine-3'-phosphate
  modified_base 21: mod_base = OTHER; note = 2'-O-methyladenosine-3'-phosphate ((2S,4R)-1-[29-[[2-(acetylamino)-2-deoxy-beta-D-galactopyra nosyl]oxy]-14,14-bis[[3-[[3-[[5-[[2-(acetylamino)-2-deoxy-b eta-D-galactopyranosyl]oxy]-1-oxopentyl]amino]propyl]amino] -3-oxopropoxy]methyl]-1,12,19,25-tetraoxo-16-oxa-13,20,24-t riazanonacos-1-yl]-4-hydroxy-2-pyrrolidinyl)methyl ester
gtgaatccaactgtaaagtta

SEQ ID NO: 1933 - RNA, 21 nt, synthetic construct
  source 1..21: mol_type = other RNA
  modified_base 1: mod_base = OTHER; note = 2'-O-methyladenosine-3'-phosphorothioate
  modified_base 2: mod_base = OTHER; note = 2'-O-methyluridine-3'-phosphorothioate
  modified_base 3: mod_base = OTHER; note = 2'-O-methylcytidine-3'-phosphate
  modified_base 4: mod_base = OTHER; note = 2'-O-methylcytidine-3'-phosphate
  modified_base 5: mod_base = OTHER; note = 2'-O-methyladenosine-3'-phosphate
  modified_base 6: mod_base = OTHER; note = 2'-O-methyladenosine-3'-phosphate
  modified_base 7: mod_base = OTHER; note = 2'-deoxy-2'-fluorocytidine-3'-phosphate
  modified_base 8: mod_base = OTHER; note = 2'-O-methyluridine-3'-phosphate
  modified_base 9: mod_base = OTHER; note = 2'-deoxy-2'-fluoroguanosine-3'-phosphate
  modified_base 10: mod_base = OTHER; note = 2'-deoxy-2'-fluorouridine-3'-phosphate
  modified_base 11: mod_base = OTHER; note = 2'-deoxy-2'-fluoroadenosine-3'-phosphate
  modified_base 12: mod_base = OTHER; note = 2'-O-methyladenosine-3'-phosphate
  modified_base 13: mod_base = OTHER; note = 2'-O-methyladenosine-3'-phosphate
  modified_base 14: mod_base = OTHER; note = 2'-O-methylguanosine-3'-phosphate
  modified_base 15: mod_base = OTHER; note = 2'-O-methyluridine-3'-phosphate
  modified_base 16: mod_base = OTHER; note = 2'-O-methyluridine-3'-phosphate
  modified_base 17: mod_base = OTHER; note = 2'-O-methylcytidine-3'-phosphate
  modified_base 18: mod_base = OTHER; note = 2'-O-methyluridine-3'-phosphate
  modified_base 19: mod_base = OTHER; note = 2'-O-methyluridine-3'-phosphate
  modified_base 20: mod_base = OTHER; note = 2'-O-methyluridine-3'-phosphate
  modified_base 21: mod_base = OTHER; note = 2'-O-methyladenosine-3'-phosphate ((2S,4R)-1-[29-[[2-(acetylamino)-2-deoxy-beta-D-galactopyra nosyl]oxy]-14,14-bis[[3-[[3-[[5-[[2-(acetylamino)-2-deoxy-b eta-D-galactopyranosyl]oxy]-1-oxopentyl]amino]propyl]amino] -3-oxopropoxy]methyl]-1,12,19,25-tetraoxo-16-oxa-13,20,24-t riazanonacos-1-yl]-4-hydroxy-2-pyrrolidinyl)methyl ester
atccaactgtaaagttcttta

SEQ ID NO: 1934 - RNA, 21 nt, synthetic construct
  source 1..21: mol_type = other RNA
  modified_base 1: mod_base = OTHER; note = 2'-O-methyluridine-3'-phosphorothioate
  modified_base 2: mod_base = OTHER; note = 2'-O-methylcytidine-3'-phosphorothioate
  modified_base 3: mod_base = OTHER; note = 2'-O-methylcytidine-3'-phosphate
  modified_base 4: mod_base = OTHER; note = 2'-O-methyladenosine-3'-phosphate
  modified_base 5: mod_base = OTHER; note = 2'-O-methyladenosine-3'-phosphate
  modified_base 6: mod_base = OTHER; note = 2'-O-methylcytidine-3'-phosphate
  modified_base 7: mod_base = OTHER; note = 2'-deoxy-2'-fluorouridine-3'-phosphate
  modified_base 8: mod_base = OTHER; note = 2'-O-methylguanosine-3'-phosphate
  modified_base 9: mod_base = OTHER; note = 2'-deoxy-2'-fluorouridine-3'-phosphate
  modified_base 10: mod_base = OTHER; note = 2'-deoxy-2'-fluoroadenosine-3'-phosphate
  modified_base 11: mod_base = OTHER; note = 2'-deoxy-2'-fluoroadenosine-3'-phosphate
  modified_base 12: mod_base = OTHER; note = 2'-O-methyladenosine-3'-phosphate
  modified_base 13: mod_base = OTHER; note = 2'-O-methylguanosine-3'-phosphate
  modified_base 14: mod_base = OTHER; note = 2'-O-methyluridine-3'-phosphate
  modified_base 15: mod_base = OTHER; note = 2'-O-methyluridine-3'-phosphate
  modified_base 16: mod_base = OTHER; note = 2'-O-methylcytidine-3'-phosphate
  modified_base 17: mod_base = OTHER; note = 2'-O-methyluridine-3'-phosphate
  modified_base 18: mod_base = OTHER; note = 2'-O-methyluridine-3'-phosphate
  modified_base 19: mod_base = OTHER; note = 2'-O-methyluridine-3'-phosphate
  modified_base 20: mod_base = OTHER; note = 2'-O-methyladenosine-3'-phosphate
  modified_base 21: mod_base = OTHER; note = 2'-O-methyladenosine-3'-phosphate ((2S,4R)-1-[29-[[2-(acetylamino)-2-deoxy-beta-D-galactopyra nosyl]oxy]-14,14-bis[[3-[[3-[[5-[[2-(acetylamino)-2-deoxy-b eta-D-galactopyranosyl]oxy]-1-oxopentyl]amino]propyl]amino] -3-oxopropoxy]methyl]-1,12,19,25-tetraoxo-16-oxa-13,20,24-t riazanonacos-1-yl]-4-hydroxy-2-pyrrolidinyl)methyl ester
tccaactgtaaagttctttaa

SEQ ID NO: 1935 - RNA, 21 nt, synthetic construct
  source 1..21: mol_type = other RNA
  modified_base 1: mod_base = OTHER; note = 2'-O-methylcytidine-3'-phosphorothioate
  modified_base 2: mod_base = OTHER; note = 2'-O-methylcytidine-3'-phosphorothioate
  modified_base 3: mod_base = OTHER; note = 2'-O-methyladenosine-3'-phosphate
  modified_base 4: mod_base = OTHER; note = 2'-O-methyladenosine-3'-phosphate
  modified_base 5: mod_base = OTHER; note = 2'-O-methylcytidine-3'-phosphate
  modified_base 6: mod_base = OTHER; note = 2'-O-methyluridine-3'-phosphate
  modified_base 7: mod_base = OTHER; note = 2'-deoxy-2'-fluoroguanosine-3'-phosphate
  modified_base 8: mod_base = OTHER; note = 2'-O-methyluridine-3'-phosphate
  modified_base 9: mod_base = OTHER; note = 2'-deoxy-2'-fluoroadenosine-3'-phosphate
  modified_base 10: mod_base = OTHER; note = 2'-deoxy-2'-fluoroadenosine-3'-phosphate
  modified_base 11: mod_base = OTHER; note = 2'-deoxy-2'-fluoroadenosine-3'-phosphate
  modified_base 12: mod_base = OTHER; note = 2'-O-methylguanosine-3'-phosphate
  modified_base 13: mod_base = OTHER; note = 2'-O-methyluridine-3'-phosphate
  modified_base 14: mod_base = OTHER; note = 2'-O-methyluridine-3'-phosphate
  modified_base 15: mod_base = OTHER; note = 2'-O-methylcytidine-3'-phosphate
  modified_base 16: mod_base = OTHER; note = 2'-O-methyluridine-3'-phosphate
  modified_base 17: mod_base = OTHER; note = 2'-O-methyluridine-3'-phosphate
  modified_base 18: mod_base = OTHER; note = 2'-O-methyluridine-3'-phosphate
  modified_base 19: mod_base = OTHER; note = 2'-O-methyladenosine-3'-phosphate
  modified_base 20: mod_base = OTHER; note = 2'-O-methyluridine-3'-phosphate
  modified_base 21: mod_base = OTHER; note = 2'-O-methyladenosine-3'-phosphate ((2S,4R)-1-[29-[[2-(acetylamino)-2-deoxy-beta-D-galactopyra nosyl]oxy]-14,14-bis[[3-[[3-[[5-[[2-(acetylamino)-2-deoxy-b eta-D-galactopyranosyl]oxy]-1-oxopentyl]amino]propyl]amino] -3-oxopropoxy]methyl]-1,12,19,25-tetraoxo-16-oxa-13,20,24-t riazanonacos-1-yl]-4-hydroxy-2-pyrrolidinyl)methyl ester
ccaactgtaaagttctttata

SEQ ID NO: 1936 - RNA, 21 nt, synthetic construct
  source 1..21: mol_type = other RNA
  modified_base 1: mod_base = OTHER; note = 2'-O-methylcytidine-3'-phosphorothioate
  modified_base 2: mod_base = OTHER; note = 2'-O-methyladenosine-3'-phosphorothioate
  modified_base 3: mod_base = OTHER; note = 2'-O-methyladenosine-3'-phosphate
  modified_base 4: mod_base = OTHER; note = 2'-O-methylcytidine-3'-phosphate
  modified_base 5: mod_base = OTHER; note = 2'-O-methyluridine-3'-phosphate
  modified_base 6: mod_base = OTHER; note = 2'-O-methylguanosine-3'-phosphate
  modified_base 7: mod_base = OTHER; note = 2'-deoxy-2'-fluorouridine-3'-phosphate
  modified_base 8: mod_base = OTHER; note = 2'-O-methyladenosine-3'-phosphate
  modified_base 9: mod_base = OTHER; note = 2'-deoxy-2'-fluoroadenosine-3'-phosphate
  modified_base 10: mod_base = OTHER; note = 2'-deoxy-2'-fluoroadenosine-3'-phosphate
  modified_base 11: mod_base = OTHER; note = 2'-deoxy-2'-fluoroguanosine-3'-phosphate
  modified_base 12: mod_base = OTHER; note = 2'-O-methyluridine-3'-phosphate
  modified_base 13: mod_base = OTHER; note = 2'-O-methyluridine-3'-phosphate
  modified_base 14: mod_base = OTHER; note = 2'-O-methylcytidine-3'-phosphate
  modified_base 15: mod_base = OTHER; note = 2'-O-methyluridine-3'-phosphate
  modified_base 16: mod_base = OTHER; note = 2'-O-methyluridine-3'-phosphate
  modified_base 17: mod_base = OTHER; note = 2'-O-methyluridine-3'-phosphate
  modified_base 18: mod_base = OTHER; note = 2'-O-methyladenosine-3'-phosphate
  modified_base 19: mod_base = OTHER; note = 2'-O-methyluridine-3'-phosphate
  modified_base 20: mod_base = OTHER; note = 2'-O-methyluridine-3'-phosphate
  modified_base 21: mod_base = OTHER; note = 2'-O-methyladenosine-3'-phosphate ((2S,4R)-1-[29-[[2-(acetylamino)-2-deoxy-beta-D-galactopyra nosyl]oxy]-14,14-bis[[3-[[3-[[5-[[2-(acetylamino)-2-deoxy-b eta-D-galactopyranosyl]oxy]-1-oxopentyl]amino]propyl]amino] -3-oxopropoxy]methyl]-1,12,19,25-tetraoxo-16-oxa-13,20,24-t riazanonacos-1-yl]-4-hydroxy-2-pyrrolidinyl)methyl ester
caactgtaaagttctttatta

SEQ ID NO: 1937 - RNA, 21 nt, synthetic construct
  source 1..21: mol_type = other RNA
  modified_base 1: mod_base = OTHER; note = 2'-O-methyladenosine-3'-phosphorothioate
  modified_base 2: mod_base = OTHER; note = 2'-O-methyladenosine-3'-phosphorothioate
  modified_base 3: mod_base = OTHER; note = 2'-O-methylcytidine-3'-phosphate
  modified_base 4: mod_base = OTHER; note = 2'-O-methyluridine-3'-phosphate
  modified_base 5: mod_base = OTHER; note = 2'-O-methylguanosine-3'-phosphate
  modified_base 6: mod_base = OTHER; note = 2'-O-methyluridine-3'-phosphate
  modified_base 7: mod_base = OTHER; note = 2'-deoxy-2'-fluoroadenosine-3'-phosphate
  modified_base 8: mod_base = OTHER; note = 2'-O-methyladenosine-3'-phosphate
  modified_base 9: mod_base = OTHER; note = 2'-deoxy-2'-fluoroadenosine-3'-phosphate
  modified_base 10: mod_base = OTHER; note = 2'-deoxy-2'-fluoroguanosine-3'-phosphate
  modified_base 11: mod_base = OTHER; note = 2'-deoxy-2'-fluorouridine-3'-phosphate
  modified_base 12: mod_base = OTHER; note = 2'-O-methyluridine-3'-phosphate
  modified_base 13: mod_base = OTHER; note = 2'-O-methylcytidine-3'-phosphate
  modified_base 14: mod_base = OTHER; note = 2'-O-methyluridine-3'-phosphate
  modified_base 15: mod_base = OTHER; note = 2'-O-methyluridine-3'-phosphate
  modified_base 16: mod_base = OTHER; note = 2'-O-methyluridine-3'-phosphate
  modified_base 17: mod_base = OTHER; note = 2'-O-methyladenosine-3'-phosphate
  modified_base 18: mod_base = OTHER; note = 2'-O-methyluridine-3'-phosphate
  modified_base 19: mod_base = OTHER; note = 2'-O-methyluridine-3'-phosphate
  modified_base 20: mod_base = OTHER; note = 2'-O-methylguanosine-3'-phosphate
  modified_base 21: mod_base = OTHER; note = 2'-O-methyladenosine-3'-phosphate ((2S,4R)-1-[29-[[2-(acetylamino)-2-deoxy-beta-D-galactopyra nosyl]oxy]-14,14-bis[[3-[[3-[[5-[[2-(acetylamino)-2-deoxy-b eta-D-galactopyranosyl]oxy]-1-oxopentyl]amino]propyl]amino] -3-oxopropoxy]methyl]-1,12,19,25-tetraoxo-16-oxa-13,20,24-t riazanonacos-1-yl]-4-hydroxy-2-pyrrolidinyl)methyl ester
aactgtaaagttctttattga

SEQ ID NO: 1938 - RNA, 21 nt, synthetic construct
  source 1..21: mol_type = other RNA
  modified_base 1: mod_base = OTHER; note = 2'-O-methylguanosine-3'-phosphorothioate
  modified_base 2: mod_base = OTHER; note = 2'-O-methyladenosine-3'-phosphorothioate
  modified_base 3: mod_base = OTHER; note = 2'-O-methylguanosine-3'-phosphate
  modified_base 4: mod_base = OTHER; note = 2'-O-methylguanosine-3'-phosphate
  modified_base 5: mod_base = OTHER; note = 2'-O-methyladenosine-3'-phosphate
  modified_base 6: mod_base = OTHER; note = 2'-O-methyladenosine-3'-phosphate
  modified_base 7: mod_base = OTHER; note = 2'-deoxy-2'-fluoroguanosine-3'-phosphate
  modified_base 8: mod_base = OTHER; note = 2'-O-methyladenosine-3'-phosphate
  modified_base 9: mod_base = OTHER; note = 2'-deoxy-2'-fluoroadenosine-3'-phosphate
  modified_base 10: mod_base = OTHER; note = 2'-deoxy-2'-fluoroadenosine-3'-phosphate
  modified_base 11: mod_base = OTHER; note = 2'-deoxy-2'-fluorouridine-3'-phosphate
  modified_base 12: mod_base = OTHER; note = 2'-O-methylcytidine-3'-phosphate
  modified_base 13: mod_base = OTHER; note = 2'-O-methyluridine-3'-phosphate
  modified_base 14: mod_base = OTHER; note = 2'-O-methylcytidine-3'-phosphate
  modified_base 15: mod_base = OTHER; note = 2'-O-methyluridine-3'-phosphate
  modified_base 16: mod_base = OTHER; note = 2'-O-methyladenosine-3'-phosphate
  modified_base 17: mod_base = OTHER; note = 2'-O-methyluridine-3'-phosphate
  modified_base 18: mod_base = OTHER; note = 2'-O-methyladenosine-3'-phosphate
  modified_base 19: mod_base = OTHER; note = 2'-O-methyladenosine-3'-phosphate
  modified_base 20: mod_base = OTHER; note = 2'-O-methyladenosine-3'-phosphate
  modified_base 21: mod_base = OTHER; note = 2'-O-methyladenosine-3'-phosphate ((2S,4R)-1-[29-[[2-(acetylamino)-2-deoxy-beta-D-galactopyra nosyl]oxy]-14,14-bis[[3-[[3-[[5-[[2-(acetylamino)-2-deoxy-b eta-D-galactopyranosyl]oxy]-1-oxopentyl]amino]propyl]amino] -3-oxopropoxy]methyl]-1,12,19,25-tetraoxo-16-oxa-13,20,24-t riazanonacos-1-yl]-4-hydroxy-2-pyrrolidinyl)methyl ester
gaggaagaaatctctataaaa

SEQ ID NO: 1939 - RNA, 21 nt, synthetic construct
  source 1..21: mol_type = other RNA
  modified_base 1: mod_base = OTHER; note = 2'-O-methylguanosine-3'-phosphorothioate
  modified_base 2: mod_base = OTHER; note = 2'-O-methylguanosine-3'-phosphorothioate
  modified_base 3: mod_base = OTHER; note = 2'-O-methyladenosine-3'-phosphate
  modified_base 4: mod_base = OTHER; note = 2'-O-methyladenosine-3'-phosphate
  modified_base 5: mod_base = OTHER; note = 2'-O-methylguanosine-3'-phosphate
  modified_base 6: mod_base = OTHER; note = 2'-O-methyluridine-3'-phosphate
  modified_base 7: mod_base = OTHER; note = 2'-deoxy-2'-fluorouridine-3'-phosphate
  modified_base 8: mod_base = OTHER; note = 2'-O-methylguanosine-3'-phosphate
  modified_base 9: mod_base = OTHER; note = 2'-deoxy-2'-fluoroadenosine-3'-phosphate
  modified_base 10: mod_base = OTHER; note = 2'-deoxy-2'-fluoroadenosine-3'-phosphate
  modified_base 11: mod_base = OTHER; note = 2'-deoxy-2'-fluoroguanosine-3'-phosphate
  modified_base 12: mod_base = OTHER; note = 2'-O-methyladenosine-3'-phosphate
  modified_base 13: mod_base = OTHER; note = 2'-O-methyluridine-3'-phosphate
  modified_base 14: mod_base = OTHER; note = 2'-O-methylcytidine-3'-phosphate
  modified_base 15: mod_base = OTHER; note = 2'-O-methyladenosine-3'-phosphate
  modified_base 16: mod_base = OTHER; note = 2'-O-methyladenosine-3'-phosphate
  modified_base 17: mod_base = OTHER; note = 2'-O-methyladenosine-3'-phosphate
  modified_base 18: mod_base = OTHER; note = 2'-O-methyluridine-3'-phosphate
  modified_base 19: mod_base = OTHER; note = 2'-O-methyluridine-3'-phosphate
  modified_base 20: mod_base = OTHER; note = 2'-O-methylguanosine-3'-phosphate
  modified_base 21: mod_base = OTHER; note = 2'-O-methyladenosine-3'-phosphate ((2S,4R)-1-[29-[[2-(acetylamino)-2-deoxy-beta-D-galactopyra nosyl]oxy]-14,14-bis[[3-[[3-[[5-[[2-(acetylamino)-2-deoxy-b eta-D-galactopyranosyl]oxy]-1-oxopentyl]amino]propyl]amino] -3-oxopropoxy]methyl]-1,12,19,25-tetraoxo-16-oxa-13,20,24-t riazanonacos-1-yl]-4-hydroxy-2-pyrrolidinyl)methyl ester
ggaagttgaagatcaaattga

SEQ ID NO: 1940 - RNA, 21 nt, synthetic construct
  source 1..21: mol_type = other RNA
  modified_base 1: mod_base = OTHER; note = 2'-O-methylguanosine-3'-phosphorothioate
  modified_base 2: mod_base = OTHER; note = 2'-O-methyladenosine-3'-phosphorothioate
  modified_base 3: mod_base = OTHER; note = 2'-O-methyladenosine-3'-phosphate
  modified_base 4: mod_base = OTHER; note = 2'-O-methylguanosine-3'-phosphate
  modified_base 5: mod_base = OTHER; note = 2'-O-methyluridine-3'-phosphate
  modified_base 6: mod_base = OTHER; note = 2'-O-methyluridine-3'-phosphate
  modified_base 7: mod_base = OTHER; note = 2'-deoxy-2'-fluoroguanosine-3'-phosphate
  modified_base 8: mod_base = OTHER; note = 2'-O-methyladenosine-3'-phosphate
  modified_base 9: mod_base = OTHER; note = 2'-deoxy-2'-fluoroadenosine-3'-phosphate
  modified_base 10: mod_base = OTHER; note = 2'-deoxy-2'-fluoroguanosine-3'-phosphate
  modified_base 11: mod_base = OTHER; note = 2'-deoxy-2'-fluoroadenosine-3'-phosphate
  modified_base 12: mod_base = OTHER; note = 2'-O-methyluridine-3'-phosphate
  modified_base 13: mod_base = OTHER; note = 2'-O-methylcytidine-3'-phosphate
  modified_base 14: mod_base = OTHER; note = 2'-O-methyladenosine-3'-phosphate
  modified_base 15: mod_base = OTHER; note = 2'-O-methyladenosine-3'-phosphate
  modified_base 16: mod_base = OTHER; note = 2'-O-methyladenosine-3'-phosphate
  modified_base 17: mod_base = OTHER; note = 2'-O-methyluridine-3'-phosphate
  modified_base 18: mod_base = OTHER; note = 2'-O-methyluridine-3'-phosphate
  modified_base 19: mod_base = OTHER; note = 2'-O-methylguanosine-3'-phosphate
  modified_base 20: mod_base = OTHER; note = 2'-O-methyladenosine-3'-phosphate
  modified_base 21: mod_base = OTHER; note = 2'-O-methyladenosine-3'-phosphate ((2S,4R)-1-[29-[[2-(acetylamino)-2-deoxy-beta-D-galactopyra nosyl]oxy]-14,14-bis[[3-[[3-[[5-[[2-(acetylamino)-2-deoxy-b eta-D-galactopyranosyl]oxy]-1-oxopentyl]amino]propyl]amino] -3-oxopropoxy]methyl]-1,12,19,25-tetraoxo-16-oxa-13,20,24-t riazanonacos-1-yl]-4-hydroxy-2-pyrrolidinyl)methyl ester
gaagttgaagatcaaattgaa

SEQ ID NO: 1941 - RNA, 21 nt, synthetic construct
  source 1..21: mol_type = other RNA
  modified_base 1: mod_base = OTHER; note = 2'-O-methyladenosine-3'-phosphorothioate
  modified_base 2: mod_base = OTHER; note = 2'-O-methyladenosine-3'-phosphorothioate
  modified_base 3: mod_base = OTHER; note = 2'-O-methylguanosine-3'-phosphate
  modified_base 4: mod_base = OTHER; note = 2'-O-methyluridine-3'-phosphate
  modified_base 5: mod_base = OTHER; note = 2'-O-methyluridine-3'-phosphate
  modified_base 6: mod_base = OTHER; note = 2'-O-methylguanosine-3'-phosphate
  modified_base 7: mod_base = OTHER; note = 2'-deoxy-2'-fluoroadenosine-3'-phosphate
  modified_base 8: mod_base = OTHER; note = 2'-O-methyladenosine-3'-phosphate
  modified_base 9: mod_base = OTHER; note = 2'-deoxy-2'-fluoroguanosine-3'-phosphate
  modified_base 10: mod_base = OTHER; note = 2'-deoxy-2'-fluoroadenosine-3'-phosphate
  modified_base 11: mod_base = OTHER; note = 2'-deoxy-2'-fluorouridine-3'-phosphate
  modified_base 12: mod_base = OTHER; note = 2'-O-methylcytidine-3'-phosphate
  modified_base 13: mod_base = OTHER; note = 2'-O-methyladenosine-3'-phosphate
  modified_base 14: mod_base = OTHER; note = 2'-O-methyladenosine-3'-phosphate
  modified_base 15: mod_base = OTHER; note = 2'-O-methyladenosine-3'-phosphate
  modified_base 16: mod_base = OTHER; note = 2'-O-methyluridine-3'-phosphate
  modified_base 17: mod_base = OTHER; note = 2'-O-methyluridine-3'-phosphate
  modified_base 18: mod_base = OTHER; note = 2'-O-methylguanosine-3'-phosphate
  modified_base 19: mod_base = OTHER; note = 2'-O-methyladenosine-3'-phosphate
  modified_base 20: mod_base = OTHER; note = 2'-O-methyladenosine-3'-phosphate
  modified_base 21: mod_base = OTHER; note = 2'-O-methyladenosine-3'-phosphate ((2S,4R)-1-[29-[[2-(acetylamino)-2-deoxy-beta-D-galactopyra nosyl]oxy]-14,14-bis[[3-[[3-[[5-[[2-(acetylamino)-2-deoxy-b eta-D-galactopyranosyl]oxy]-1-oxopentyl]amino]propyl]amino] -3-oxopropoxy]methyl]-1,12,19,25-tetraoxo-16-oxa-13,20,24-t riazanonacos-1-yl]-4-hydroxy-2-pyrrolidinyl)methyl ester
aagttgaagatcaaattgaaa

SEQ ID NO: 1942 - RNA, 21 nt, synthetic construct
  source 1..21: mol_type = other RNA
  modified_base 1: mod_base = OTHER; note = 2'-O-methyladenosine-3'-phosphorothioate
  modified_base 2: mod_base = OTHER; note = 2'-O-methyladenosine-3'-phosphorothioate
  modified_base 3: mod_base = OTHER; note = 2'-O-methylguanosine-3'-phosphate
  modified_base 4: mod_base = OTHER; note = 2'-O-methyladenosine-3'-phosphate
  modified_base 5: mod_base = OTHER; note = 2'-O-methylcytidine-3'-phosphate
  modified_base 6: mod_base = OTHER; note = 2'-O-methylcytidine-3'-phosphate
  modified_base 7: mod_base = OTHER; note = 2'-deoxy-2'-fluoroadenosine-3'-phosphate
  modified_base 8: mod_base = OTHER; note = 2'-O-methylcytidine-3'-phosphate
  modified_base 9: mod_base = OTHER; note = 2'-deoxy-2'-fluoroadenosine-3'-phosphate
  modified_base 10: mod_base = OTHER; note = 2'-deoxy-2'-fluorouridine-3'-phosphate
  modified_base 11: mod_base = OTHER; note = 2'-deoxy-2'-fluorouridine-3'-phosphate
  modified_base 12: mod_base = OTHER; note = 2'-O-methyluridine-3'-phosphate
  modified_base 13: mod_base = OTHER; note = 2'-O-methylguanosine-3'-phosphate
  modified_base 14: mod_base = OTHER; note = 2'-O-methyluridine-3'-phosphate
  modified_base 15: mod_base = OTHER; note = 2'-O-methyluridine-3'-phosphate
  modified_base 16: mod_base = OTHER; note = 2'-O-methylcytidine-3'-phosphate
  modified_base 17: mod_base = OTHER; note = 2'-O-methyluridine-3'-phosphate
  modified_base 18: mod_base = OTHER; note = 2'-O-methylcytidine-3'-phosphate
  modified_base 19: mod_base = OTHER; note = 2'-O-methyladenosine-3'-phosphate
  modified_base 20: mod_base = OTHER; note = 2'-O-methyluridine-3'-phosphate
  modified_base 21: mod_base = OTHER; note = 2'-O-methyladenosine-3'-phosphate ((2S,4R)-1-[29-[[2-(acetylamino)-2-deoxy-beta-D-galactopyra nosyl]oxy]-14,14-bis[[3-[[3-[[5-[[2-(acetylamino)-2-deoxy-b eta-D-galactopyranosyl]oxy]-1-oxopentyl]amino]propyl]amino] -3-oxopropoxy]methyl]-1,12,19,25-tetraoxo-16-oxa-13,20,24-t riazanonacos-1-yl]-4-hydroxy-2-pyrrolidinyl)methyl ester
aagaccacatttgttctcata

SEQ ID NO: 1943 - RNA, 21 nt, synthetic construct
  source 1..21: mol_type = other RNA
  modified_base 1: mod_base = OTHER; note = 2'-O-methyluridine-3'-phosphorothioate
  modified_base 2: mod_base = OTHER; note = 2'-O-methylguanosine-3'-phosphorothioate
  modified_base 3: mod_base = OTHER; note = 2'-O-methyluridine-3'-phosphate
  modified_base 4: mod_base = OTHER; note = 2'-O-methyluridine-3'-phosphate
  modified_base 5: mod_base = OTHER; note = 2'-O-methylcytidine-3'-phosphate
  modified_base 6: mod_base = OTHER; note = 2'-O-methyluridine-3'-phosphate
  modified_base 7: mod_base = OTHER; note = 2'-deoxy-2'-fluorocytidine-3'-phosphate
  modified_base 8: mod_base = OTHER; note = 2'-O-methyladenosine-3'-phosphate
  modified_base 9: mod_base = OTHER; note = 2'-deoxy-2'-fluorouridine-3'-phosphate
  modified_base 10: mod_base = OTHER; note = 2'-deoxy-2'-fluorouridine-3'-phosphate
  modified_base 11: mod_base = OTHER; note = 2'-deoxy-2'-fluoroadenosine-3'-phosphate
  modified_base 12: mod_base = OTHER; note = 2'-O-methyluridine-3'-phosphate
  modified_base 13: mod_base = OTHER; note = 2'-O-methylcytidine-3'-phosphate
  modified_base 14: mod_base = OTHER; note = 2'-O-methyluridine-3'-phosphate
  modified_base 15: mod_base = OTHER; note = 2'-O-methylcytidine-3'-phosphate
  modified_base 16: mod_base = OTHER; note = 2'-O-methyladenosine-3'-phosphate
  modified_base 17: mod_base = OTHER; note = 2'-O-methyladenosine-3'-phosphate
  modified_base 18: mod_base = OTHER; note = 2'-O-methyladenosine-3'-phosphate
  modified_base 19: mod_base = OTHER; note = 2'-O-methyladenosine-3'-phosphate
  modified_base 20: mod_base = OTHER; note = 2'-O-methylguanosine-3'-phosphate
  modified_base 21: mod_base = OTHER; note = 2'-O-methyladenosine-3'-phosphate ((2S,4R)-1-[29-[[2-(acetylamino)-2-deoxy-beta-D-galactopyra nosyl]oxy]-14,14-bis[[3-[[3-[[5-[[2-(acetylamino)-2-deoxy-b eta-D-galactopyranosyl]oxy]-1-oxopentyl]amino]propyl]amino] -3-oxopropoxy]methyl]-1,12,19,25-tetraoxo-16-oxa-13,20,24-t riazanonacos-1-yl]-4-hydroxy-2-pyrrolidinyl)methyl ester
tgttctcattatctcaaaaga

SEQ ID NO: 1944 - RNA, 21 nt, synthetic construct
  source 1..21: mol_type = other RNA
  modified_base 1: mod_base = OTHER; note = 2'-O-methylguanosine-3'-phosphorothioate
  modified_base 2: mod_base = OTHER; note = 2'-O-methyluridine-3'-phosphorothioate
  modified_base 3: mod_base = OTHER; note = 2'-O-methyluridine-3'-phosphate
  modified_base 4: mod_base = OTHER; note = 2'-O-methylcytidine-3'-phosphate
  modified_base 5: mod_base = OTHER; note = 2'-O-methyluridine-3'-phosphate
  modified_base 6: mod_base = OTHER; note = 2'-O-methylcytidine-3'-phosphate
  modified_base 7: mod_base = OTHER; note = 2'-deoxy-2'-fluoroadenosine-3'-phosphate
  modified_base 8: mod_base = OTHER; note = 2'-O-methyluridine-3'-phosphate
  modified_base 9: mod_base = OTHER; note = 2'-deoxy-2'-fluorouridine-3'-phosphate
  modified_base 10: mod_base = OTHER; note = 2'-deoxy-2'-fluoroadenosine-3'-phosphate
  modified_base 11: mod_base = OTHER; note = 2'-deoxy-2'-fluorouridine-3'-phosphate
  modified_base 12: mod_base = OTHER; note = 2'-O-methylcytidine-3'-phosphate
  modified_base 13: mod_base = OTHER; note = 2'-O-methyluridine-3'-phosphate
  modified_base 14: mod_base = OTHER; note = 2'-O-methylcytidine-3'-phosphate
  modified_base 15: mod_base = OTHER; note = 2'-O-methyladenosine-3'-phosphate
  modified_base 16: mod_base = OTHER; note = 2'-O-methyladenosine-3'-phosphate
  modified_base 17: mod_base = OTHER; note = 2'-O-methyladenosine-3'-phosphate
  modified_base 18: mod_base = OTHER; note = 2'-O-methyladenosine-3'-phosphate
  modified_base 19: mod_base = OTHER; note = 2'-O-methylguanosine-3'-phosphate
  modified_base 20: mod_base = OTHER; note = 2'-O-methyluridine-3'-phosphate
  modified_base 21: mod_base = OTHER; note = 2'-O-methyladenosine-3'-phosphate ((2S,4R)-1-[29-[[2-(acetylamino)-2-deoxy-beta-D-galactopyra nosyl]oxy]-14,14-bis[[3-[[3-[[5-[[2-(acetylamino)-2-deoxy-b eta-D-galactopyranosyl]oxy]-1-oxopentyl]amino]propyl]amino] -3-oxopropoxy]methyl]-1,12,19,25-tetraoxo-16-oxa-13,20,24-t riazanonacos-1-yl]-4-hydroxy-2-pyrrolidinyl)methyl ester
gttctcattatctcaaaagta

SEQ ID NO: 1945 - RNA, 21 nt, synthetic construct
  source 1..21: mol_type = other RNA
  modified_base 1: mod_base = OTHER; note = 2'-O-methyluridine-3'-phosphorothioate
  modified_base 2: mod_base = OTHER; note = 2'-O-methyluridine-3'-phosphorothioate
  modified_base 3: mod_base = OTHER; note = 2'-O-methylcytidine-3'-phosphate
  modified_base 4: mod_base = OTHER; note = 2'-O-methyluridine-3'-phosphate
  modified_base 5: mod_base = OTHER; note = 2'-O-methylcytidine-3'-phosphate
  modified_base 6: mod_base = OTHER; note = 2'-O-methyladenosine-3'-phosphate
  modified_base 7: mod_base = OTHER; note = 2'-deoxy-2'-fluorouridine-3'-phosphate
  modified_base 8: mod_base = OTHER; note = 2'-O-methyluridine-3'-phosphate
  modified_base 9: mod_base = OTHER; note = 2'-deoxy-2'-fluoroadenosine-3'-phosphate
  modified_base 10: mod_base = OTHER; note = 2'-deoxy-2'-fluorouridine-3'-phosphate
  modified_base 11: mod_base = OTHER; note = 2'-deoxy-2'-fluorocytidine-3'-phosphate
  modified_base 12: mod_base = OTHER; note = 2'-O-methyluridine-3'-phosphate
  modified_base 13: mod_base = OTHER; note = 2'-O-methylcytidine-3'-phosphate
  modified_base 14: mod_base = OTHER; note = 2'-O-methyladenosine-3'-phosphate
  modified_base 15: mod_base = OTHER; note = 2'-O-methyladenosine-3'-phosphate
  modified_base 16: mod_base = OTHER; note = 2'-O-methyladenosine-3'-phosphate
  modified_base 17: mod_base = OTHER; note = 2'-O-methyladenosine-3'-phosphate
  modified_base 18: mod_base = OTHER; note = 2'-O-methylguanosine-3'-phosphate
  modified_base 19: mod_base = OTHER; note = 2'-O-methyluridine-3'-phosphate
  modified_base 20: mod_base = OTHER; note = 2'-O-methylguanosine-3'-phosphate
  modified_base 21: mod_base = OTHER; note = 2'-O-methyladenosine-3'-phosphate ((2S,4R)-1-[29-[[2-(acetylamino)-2-deoxy-beta-D-galactopyra nosyl]oxy]-14,14-bis[[3-[[3-[[5-[[2-(acetylamino)-2-deoxy-b eta-D-galactopyranosyl]oxy]-1-oxopentyl]amino]propyl]amino] -3-oxopropoxy]methyl]-1,12,19,25-tetraoxo-16-oxa-13,20,24-t riazanonacos-1-yl]-4-hydroxy-2-pyrrolidinyl)methyl ester
ttctcattatctcaaaagtga

SEQ ID NO: 1946 - RNA, 21 nt, synthetic construct
  source 1..21: mol_type = other RNA
  modified_base 1: mod_base = OTHER; note = 2'-O-methylcytidine-3'-phosphorothioate
  modified_base 2: mod_base = OTHER; note = 2'-O-methyluridine-3'-phosphorothioate
  modified_base 3: mod_base = OTHER; note = 2'-O-methylguanosine-3'-phosphate
  modified_base 4: mod_base = OTHER; note = 2'-O-methylcytidine-3'-phosphate
  modified_base 5: mod_base = OTHER; note = 2'-O-methyluridine-3'-phosphate
  modified_base 6: mod_base = OTHER; note = 2'-O-methyluridine-3'-phosphate
  modified_base 7: mod_base = OTHER; note = 2'-deoxy-2'-fluorouridine-3'-phosphate
  modified_base 8: mod_base = OTHER; note = 2'-O-methylcytidine-3'-phosphate
  modified_base 9: mod_base = OTHER; note = 2'-deoxy-2'-fluorouridine-3'-phosphate
  modified_base 10: mod_base = OTHER; note = 2'-deoxy-2'-fluorocytidine-3'-phosphate
  modified_base 11: mod_base = OTHER; note = 2'-deoxy-2'-fluorocytidine-3'-phosphate
  modified_base 12: mod_base = OTHER; note = 2'-O-methyladenosine-3'-phosphate
  modified_base 13: mod_base = OTHER; note = 2'-O-methylguanosine-3'-phosphate
  modified_base 14: mod_base = OTHER; note = 2'-O-methyluridine-3'-phosphate
  modified_base 15: mod_base = OTHER; note = 2'-O-methyluridine-3'-phosphate
  modified_base 16: mod_base = OTHER; note = 2'-O-methyluridine-3'-phosphate
  modified_base 17: mod_base = OTHER; note = 2'-O-methyluridine-3'-phosphate
  modified_base 18: mod_base = OTHER; note = 2'-O-methyladenosine-3'-phosphate
  modified_base 19: mod_base = OTHER; note = 2'-O-methylcytidine-3'-phosphate
  modified_base 20: mod_base = OTHER; note = 2'-O-methyladenosine-3'-phosphate
  modified_base 21: mod_base = OTHER; note = 2'-O-methyladenosine-3'-phosphate ((2S,4R)-1-[29-[[2-(acetylamino)-2-deoxy-beta-D-galactopyra nosyl]oxy]-14,14-bis[[3-[[3-[[5-[[2-(acetylamino)-2-deoxy-b eta-D-galactopyranosyl]oxy]-1-oxopentyl]amino]propyl]amino] -3-oxopropoxy]methyl]-1,12,19,25-tetraoxo-16-oxa-13,20,24-t riazanonacos-1-yl]-4-hydroxy-2-pyrrolidinyl)methyl ester
ctgctttctccagttttacaa

SEQ ID NO: 1947 - RNA, 21 nt, synthetic construct
  source 1..21: mol_type = other RNA
  modified_base 1: mod_base = OTHER; note = 2'-O-methyluridine-3'-phosphorothioate
  modified_base 2: mod_base = OTHER; note = 2'-O-methyluridine-3'-phosphorothioate
  modified_base 3: mod_base = OTHER; note = 2'-O-methyladenosine-3'-phosphate
  modified_base 4: mod_base = OTHER; note = 2'-O-methylguanosine-3'-phosphate
  modified_base 5: mod_base = OTHER; note = 2'-O-methyladenosine-3'-phosphate
  modified_base 6: mod_base = OTHER; note = 2'-O-methylguanosine-3'-phosphate
  modified_base 7: mod_base = OTHER; note = 2'-deoxy-2'-fluorocytidine-3'-phosphate
  modified_base 8: mod_base = OTHER; note = 2'-O-methyladenosine-3'-phosphate
  modified_base 9: mod_base = OTHER; note = 2'-deoxy-2'-fluoroadenosine-3'-phosphate
  modified_base 10: mod_base = OTHER; note = 2'-deoxy-2'-fluorouridine-3'-phosphate
  modified_base 11: mod_base = OTHER; note = 2'-deoxy-2'-fluorouridine-3'-phosphate
  modified_base 12: mod_base = OTHER; note = 2'-O-methyluridine-3'-phosphate
  modified_base 13: mod_base = OTHER; note = 2'-O-methylguanosine-3'-phosphate
  modified_base 14: mod_base = OTHER; note = 2'-O-methylguanosine-3'-phosphate
  modified_base 15: mod_base = OTHER; note = 2'-O-methyladenosine-3'-phosphate
  modified_base 16: mod_base = OTHER; note = 2'-O-methyluridine-3'-phosphate
  modified_base 17: mod_base = OTHER; note = 2'-O-methyluridine-3'-phosphate
  modified_base 18: mod_base = OTHER; note = 2'-O-methyluridine-3'-phosphate
  modified_base 19: mod_base = OTHER; note = 2'-O-methyluridine-3'-phosphate
  modified_base 20: mod_base = OTHER; note = 2'-O-methylcytidine-3'-phosphate
  modified_base 21: mod_base = OTHER; note = 2'-O-methyladenosine-3'-phosphate ((2S,4R)-1-[29-[[2-(acetylamino)-2-deoxy-beta-D-galactopyra nosyl]oxy]-14,14-bis[[3-[[3-[[5-[[2-(acetylamino)-2-deoxy-b eta-D-galactopyranosyl]oxy]-1-oxopentyl]amino]propyl]amino] -3-oxopropoxy]methyl]-1,12,19,25-tetraoxo-16-oxa-13,20,24-t riazanonacos-1-yl]-4-hydroxy-2-pyrrolidinyl)methyl ester
ttagagcaatttggattttca

SEQ ID NO: 1948 - RNA, 21 nt, synthetic construct
  source 1..21: mol_type = other RNA
  modified_base 1: mod_base = OTHER; note = 2'-O-methyluridine-3'-phosphorothioate
  modified_base 2: mod_base = OTHER; note = 2'-O-methyluridine-3'-phosphorothioate
  modified_base 3: mod_base = OTHER; note = 2'-O-methylcytidine-3'-phosphate
  modified_base 4: mod_base = OTHER; note = 2'-O-methyluridine-3'-phosphate
  modified_base 5: mod_base = OTHER; note = 2'-O-methylguanosine-3'-phosphate
  modified_base 6: mod_base = OTHER; note = 2'-O-methyladenosine-3'-phosphate
  modified_base 7: mod_base = OTHER; note = 2'-deoxy-2'-fluoroguanosine-3'-phosphate
  modified_base 8: mod_base = OTHER; note = 2'-O-methyladenosine-3'-phosphate
  modified_base 9: mod_base = OTHER; note = 2'-deoxy-2'-fluoroadenosine-3'-phosphate
  modified_base 10: mod_base = OTHER; note = 2'-deoxy-2'-fluoroadenosine-3'-phosphate
  modified_base 11: mod_base = OTHER; note = 2'-deoxy-2'-fluoroguanosine-3'-phosphate
  modified_base 12: mod_base = OTHER; note = 2'-O-methyladenosine-3'-phosphate
  modified_base 13: mod_base = OTHER; note = 2'-O-methylcytidine-3'-phosphate
  modified_base 14: mod_base = OTHER; note = 2'-O-methyluridine-3'-phosphate
  modified_base 15: mod_base = OTHER; note = 2'-O-methyladenosine-3'-phosphate
  modified_base 16: mod_base = OTHER; note = 2'-O-methyluridine-3'-phosphate
  modified_base 17: mod_base = OTHER; note = 2'-O-methyluridine-3'-phosphate
  modified_base 18: mod_base = OTHER; note = 2'-O-methylcytidine-3'-phosphate
  modified_base 19: mod_base = OTHER; note = 2'-O-methyladenosine-3'-phosphate
  modified_base 20: mod_base = OTHER; note = 2'-O-methyladenosine-3'-phosphate
  modified_base 21: mod_base = OTHER; note = 2'-O-methyladenosine-3'-phosphate ((2S,4R)-1-[29-[[2-(acetylamino)-2-deoxy-beta-D-galactopyra nosyl]oxy]-14,14-bis[[3-[[3-[[5-[[2-(acetylamino)-2-deoxy-b eta-D-galactopyranosyl]oxy]-1-oxopentyl]amino]propyl]amino] -3-oxopropoxy]methyl]-1,12,19,25-tetraoxo-16-oxa-13,20,24-t riazanonacos-1-yl]-4-hydroxy-2-pyrrolidinyl)methyl ester
ttctgagaaagactattcaaa

SEQ ID NO: 1949 - RNA, 21 nt, synthetic construct
  source 1..21: mol_type = other RNA
  modified_base 1: mod_base = OTHER; note = 2'-O-methyluridine-3'-phosphorothioate
  modified_base 2: mod_base = OTHER; note = 2'-O-methyluridine-3'-phosphorothioate
  modified_base 3: mod_base = OTHER; note = 2'-O-methyladenosine-3'-phosphate
  modified_base 4: mod_base = OTHER; note = 2'-O-methyluridine-3'-phosphate
  modified_base 5: mod_base = OTHER; note = 2'-O-methylguanosine-3'-phosphate
  modified_base 6: mod_base = OTHER; note = 2'-O-methyluridine-3'-phosphate
  modified_base 7: mod_base = OTHER; note = 2'-deoxy-2'-fluorocytidine-3'-phosphate
  modified_base 8: mod_base = OTHER; note = 2'-O-methyluridine-3'-phosphate
  modified_base 9: mod_base = OTHER; note = 2'-deoxy-2'-fluorouridine-3'-phosphate
  modified_base 10: mod_base = OTHER; note = 2'-deoxy-2'-fluoroguanosine-3'-phosphate
  modified_base 11: mod_base = OTHER; note = 2'-deoxy-2'-fluoroadenosine-3'-phosphate
  modified_base 12: mod_base = OTHER; note = 2'-O-methyladenosine-3'-phosphate
  modified_base 13: mod_base = OTHER; note = 2'-O-methyluridine-3'-phosphate
  modified_base 14: mod_base = OTHER; note = 2'-O-methylcytidine-3'-phosphate
  modified_base 15: mod_base = OTHER; note = 2'-O-methyladenosine-3'-phosphate
  modified_base 16: mod_base = OTHER; note = 2'-O-methyladenosine-3'-phosphate
  modified_base 17: mod_base = OTHER; note = 2'-O-methyladenosine-3'-phosphate
  modified_base 18: mod_base = OTHER; note = 2'-O-methylcytidine-3'-phosphate
  modified_base 19: mod_base = OTHER; note = 2'-O-methyluridine-3'-phosphate
  modified_base 20: mod_base = OTHER; note = 2'-O-methyluridine-3'-phosphate
  modified_base 21: mod_base = OTHER; note = 2'-O-methyladenosine-3'-phosphate ((2S,4R)-1-[29-[[2-(acetylamino)-2-deoxy-beta-D-galactopyra nosyl]oxy]-14,14-bis[[3-[[3-[[5-[[2-(acetylamino)-2-deoxy-b eta-D-galactopyranosyl]oxy]-1-oxopentyl]amino]propyl]amino] -3-oxopropoxy]methyl]-1,12,19,25-tetraoxo-16-oxa-13,20,24-t riazanonacos-1-yl]-4-hydroxy-2-pyrrolidinyl)methyl ester
ttatgtcttgaatcaaactta

SEQ ID NO: 1950 - RNA, 21 nt, synthetic construct
  source 1..21: mol_type = other RNA
  modified_base 1: mod_base = OTHER; note = 2'-O-methylguanosine-3'-phosphorothioate
  modified_base 2: mod_base = OTHER; note = 2'-O-methyladenosine-3'-phosphorothioate
  modified_base 3: mod_base = OTHER; note = 2'-O-methylcytidine-3'-phosphate
  modified_base 4: mod_base = OTHER; note = 2'-O-methyladenosine-3'-phosphate
  modified_base 5: mod_base = OTHER; note = 2'-O-methylcytidine-3'-phosphate
  modified_base 6: mod_base = OTHER; note = 2'-O-methyladenosine-3'-phosphate
  modified_base 7: mod_base = OTHER; note = 2'-deoxy-2'-fluorouridine-3'-phosphate
  modified_base 8: mod_base = OTHER; note = 2'-O-methyluridine-3'-phosphate
  modified_base 9: mod_base = OTHER; note = 2'-deoxy-2'-fluorouridine-3'-phosphate
  modified_base 10: mod_base = OTHER; note = 2'-deoxy-2'-fluoroguanosine-3'-phosphate
  modified_base 11: mod_base = OTHER; note = 2'-deoxy-2'-fluorouridine-3'-phosphate
  modified_base 12: mod_base = OTHER; note = 2'-O-methyluridine-3'-phosphate
  modified_base 13: mod_base = OTHER; note = 2'-O-methylcytidine-3'-phosphate
  modified_base 14: mod_base = OTHER; note = 2'-O-methyladenosine-3'-phosphate
  modified_base 15: mod_base = OTHER; note = 2'-O-methyladenosine-3'-phosphate
  modified_base 16: mod_base = OTHER; note = 2'-O-methyladenosine-3'-phosphate
  modified_base 17: mod_base = OTHER; note = 2'-O-methylguanosine-3'-phosphate
  modified_base 18: mod_base = OTHER; note = 2'-O-methylguanosine-3'-phosphate
  modified_base 19: mod_base = OTHER; note = 2'-O-methyluridine-3'-phosphate
  modified_base 20: mod_base = OTHER; note = 2'-O-methyluridine-3'-phosphate
  modified_base 21: mod_base = OTHER; note = 2'-O-methyladenosine-3'-phosphate ((2S,4R)-1-[29-[[2-(acetylamino)-2-deoxy-beta-D-galactopyra nosyl]oxy]-14,14-bis[[3-[[3-[[5-[[2-(acetylamino)-2-deoxy-b eta-D-galactopyranosyl]oxy]-1-oxopentyl]amino]propyl]amino] -3-oxopropoxy]methyl]-1,12,19,25-tetraoxo-16-oxa-13,20,24-t riazanonacos-1-yl]-4-hydroxy-2-pyrrolidinyl)methyl ester
gacacatttgttcaaaggtta

SEQ ID NO: 1951 - RNA, 21 nt, synthetic construct
  source 1..21: mol_type = other RNA
  modified_base 1: mod_base = OTHER; note = 2'-O-methyluridine-3'-phosphorothioate
  modified_base 2: mod_base = OTHER; note = 2'-O-methyluridine-3'-phosphorothioate
  modified_base 3: mod_base = OTHER; note = 2'-O-methylguanosine-3'-phosphate
  modified_base 4: mod_base = OTHER; note = 2'-O-methyluridine-3'-phosphate
  modified_base 5: mod_base = OTHER; note = 2'-O-methyluridine-3'-phosphate
  modified_base 6: mod_base = OTHER; note = 2'-O-methylcytidine-3'-phosphate
  modified_base 7: mod_base = OTHER; note = 2'-deoxy-2'-fluoroadenosine-3'-phosphate
  modified_base 8: mod_base = OTHER; note = 2'-O-methyladenosine-3'-phosphate
  modified_base 9: mod_base = OTHER; note = 2'-deoxy-2'-fluoroadenosine-3'-phosphate
  modified_base 10: mod_base = OTHER; note = 2'-deoxy-2'-fluoroguanosine-3'-phosphate
  modified_base 11: mod_base = OTHER; note = 2'-deoxy-2'-fluoroguanosine-3'-phosphate
  modified_base 12: mod_base = OTHER; note = 2'-O-methyluridine-3'-phosphate
  modified_base 13: mod_base = OTHER; note = 2'-O-methyluridine-3'-phosphate
  modified_base 14: mod_base = OTHER; note = 2'-O-methylcytidine-3'-phosphate
  modified_base 15: mod_base = OTHER; note = 2'-O-methyluridine-3'-phosphate
  modified_base 16: mod_base = OTHER; note = 2'-O-methyluridine-3'-phosphate
  modified_base 17: mod_base = OTHER; note = 2'-O-methylguanosine-3'-phosphate
  modified_base 18: mod_base = OTHER; note = 2'-O-methyluridine-3'-phosphate
  modified_base 19: mod_base = OTHER; note = 2'-O-methyluridine-3'-phosphate
  modified_base 20: mod_base = OTHER; note = 2'-O-methyluridine-3'-phosphate
  modified_base 21: mod_base = OTHER; note = 2'-O-methyladenosine-3'-phosphate ((2S,4R)-1-[29-[[2-(acetylamino)-2-deoxy-beta-D-galactopyra nosyl]oxy]-14,14-bis[[3-[[3-[[5-[[2-(acetylamino)-2-deoxy-b eta-D-galactopyranosyl]oxy]-1-oxopentyl]amino]propyl]amino] -3-oxopropoxy]methyl]-1,12,19,25-tetraoxo-16-oxa-13,20,24-t riazanonacos-1-yl]-4-hydroxy-2-pyrrolidinyl)methyl ester
ttgttcaaaggttcttgttta

SEQ ID NO: 1952 - RNA, 21 nt, synthetic construct
  source 1..21: mol_type = other RNA
  modified_base 1: mod_base = OTHER; note = 2'-O-methyluridine-3'-phosphorothioate
  modified_base 2: mod_base = OTHER; note = 2'-O-methylguanosine-3'-phosphorothioate
  modified_base 3: mod_base = OTHER; note = 2'-O-methyluridine-3'-phosphate
  modified_base 4: mod_base = OTHER; note = 2'-O-methyluridine-3'-phosphate
  modified_base 5: mod_base = OTHER; note = 2'-O-methylcytidine-3'-phosphate
  modified_base 6: mod_base = OTHER; note = 2'-O-methyladenosine-3'-phosphate
  modified_base 7: mod_base = OTHER; note = 2'-deoxy-2'-fluoroadenosine-3'-phosphate
  modified_base 8: mod_base = OTHER; note = 2'-O-methyladenosine-3'-phosphate
  modified_base 9: mod_base = OTHER; note = 2'-deoxy-2'-fluoroguanosine-3'-phosphate
  modified_base 10: mod_base = OTHER; note = 2'-deoxy-2'-fluoroguanosine-3'-phosphate
  modified_base 11: mod_base = OTHER; note = 2'-deoxy-2'-fluorouridine-3'-phosphate
  modified_base 12: mod_base = OTHER; note = 2'-O-methyluridine-3'-phosphate
  modified_base 13: mod_base = OTHER; note = 2'-O-methylcytidine-3'-phosphate
  modified_base 14: mod_base = OTHER; note = 2'-O-methyluridine-3'-phosphate
  modified_base 15: mod_base = OTHER; note = 2'-O-methyluridine-3'-phosphate
  modified_base 16: mod_base = OTHER; note = 2'-O-methylguanosine-3'-phosphate
  modified_base 17: mod_base = OTHER; note = 2'-O-methyluridine-3'-phosphate
  modified_base 18: mod_base = OTHER; note = 2'-O-methyluridine-3'-phosphate
  modified_base 19: mod_base = OTHER; note = 2'-O-methyluridine-3'-phosphate
  modified_base 20: mod_base = OTHER; note = 2'-O-methyladenosine-3'-phosphate
  modified_base 21: mod_base = OTHER; note = 2'-O-methyladenosine-3'-phosphate ((2S,4R)-1-[29-[[2-(acetylamino)-2-deoxy-beta-D-galactopyra nosyl]oxy]-14,14-bis[[3-[[3-[[5-[[2-(acetylamino)-2-deoxy-b eta-D-galactopyranosyl]oxy]-1-oxopentyl]amino]propyl]amino] -3-oxopropoxy]methyl]-1,12,19,25-tetraoxo-16-oxa-13,20,24-t riazanonacos-1-yl]-4-hydroxy-2-pyrrolidinyl)methyl ester
tgttcaaaggttcttgtttaa

SEQ ID NO: 1953 - RNA, 21 nt, synthetic construct
  source 1..21: mol_type = other RNA
  modified_base 1: mod_base = OTHER; note = 2'-O-methylguanosine-3'-phosphorothioate
  modified_base 2: mod_base = OTHER; note = 2'-O-methyluridine-3'-phosphorothioate
  modified_base 3: mod_base = OTHER; note = 2'-O-methyluridine-3'-phosphate
  modified_base 4: mod_base = OTHER; note = 2'-O-methylcytidine-3'-phosphate
  modified_base 5: mod_base = OTHER; note = 2'-O-methyladenosine-3'-phosphate
  modified_base 6: mod_base = OTHER; note = 2'-O-methyladenosine-3'-phosphate
  modified_base 7: mod_base = OTHER; note = 2'-deoxy-2'-fluoroadenosine-3'-phosphate
  modified_base 8: mod_base = OTHER; note = 2'-O-methylguanosine-3'-phosphate
  modified_base 9: mod_base = OTHER; note = 2'-deoxy-2'-fluoroguanosine-3'-phosphate
  modified_base 10: mod_base = OTHER; note = 2'-deoxy-2'-fluorouridine-3'-phosphate
  modified_base 11: mod_base = OTHER; note = 2'-deoxy-2'-fluorouridine-3'-phosphate
  modified_base 12: mod_base = OTHER; note = 2'-O-methylcytidine-3'-phosphate
  modified_base 13: mod_base = OTHER; note = 2'-O-methyluridine-3'-phosphate
  modified_base 14: mod_base = OTHER; note = 2'-O-methyluridine-3'-phosphate
  modified_base 15: mod_base = OTHER; note = 2'-O-methylguanosine-3'-phosphate
  modified_base 16: mod_base = OTHER; note = 2'-O-methyluridine-3'-phosphate
  modified_base 17: mod_base = OTHER; note = 2'-O-methyluridine-3'-phosphate
  modified_base 18: mod_base = OTHER; note = 2'-O-methyluridine-3'-phosphate
  modified_base 19: mod_base = OTHER; note = 2'-O-methyladenosine-3'-phosphate
  modified_base 20: mod_base = OTHER; note = 2'-O-methyladenosine-3'-phosphate
  modified_base 21: mod_base = OTHER; note = 2'-O-methyladenosine-3'-phosphate ((2S,4R)-1-[29-[[2-(acetylamino)-2-deoxy-beta-D-galactopyra nosyl]oxy]-14,14-bis[[3-[[3-[[5-[[2-(acetylamino)-2-deoxy-b eta-D-galactopyranosyl]oxy]-1-oxopentyl]amino]propyl]amino] -3-oxopropoxy]methyl]-1,12,19,25-tetraoxo-16-oxa-13,20,24-t riazanonacos-1-yl]-4-hydroxy-2-pyrrolidinyl)methyl ester
gttcaaaggttcttgtttaaa

SEQ ID NO: 1954 - RNA, 21 nt, synthetic construct
  source 1..21: mol_type = other RNA
  modified_base 1: mod_base = OTHER; note = 2'-O-methyluridine-3'-phosphorothioate
  modified_base 2: mod_base = OTHER; note = 2'-O-methylcytidine-3'-phosphorothioate
  modified_base 3: mod_base = OTHER; note = 2'-O-methyladenosine-3'-phosphate
  modified_base 4: mod_base = OTHER; note = 2'-O-methyladenosine-3'-phosphate
  modified_base 5: mod_base = OTHER; note = 2'-O-methyladenosine-3'-phosphate
  modified_base 6: mod_base = OTHER; note = 2'-O-methylguanosine-3'-phosphate
  modified_base 7: mod_base = OTHER; note = 2'-deoxy-2'-fluoroguanosine-3'-phosphate
  modified_base 8: mod_base = OTHER; note = 2'-O-methyluridine-3'-phosphate
  modified_base 9: mod_base = OTHER; note = 2'-deoxy-2'-fluorouridine-3'-phosphate
  modified_base 10: mod_base = OTHER; note = 2'-deoxy-2'-fluorocytidine-3'-phosphate
  modified_base 11: mod_base = OTHER; note = 2'-deoxy-2'-fluorouridine-3'-phosphate
  modified_base 12: mod_base = OTHER; note = 2'-O-methyluridine-3'-phosphate
  modified_base 13: mod_base = OTHER; note = 2'-O-methylguanosine-3'-phosphate
  modified_base 14: mod_base = OTHER; note = 2'-O-methyluridine-3'-phosphate
  modified_base 15: mod_base = OTHER; note = 2'-O-methyluridine-3'-phosphate
  modified_base 16: mod_base = OTHER; note = 2'-O-methyluridine-3'-phosphate
  modified_base 17: mod_base = OTHER; note = 2'-O-methyladenosine-3'-phosphate
  modified_base 18: mod_base = OTHER; note = 2'-O-methyladenosine-3'-phosphate
  modified_base 19: mod_base = OTHER; note = 2'-O-methylcytidine-3'-phosphate
  modified_base 20: mod_base = OTHER; note = 2'-O-methyluridine-3'-phosphate
  modified_base 21: mod_base = OTHER; note = 2'-O-methyladenosine-3'-phosphate ((2S,4R)-1-[29-[[2-(acetylamino)-2-deoxy-beta-D-galactopyra nosyl]oxy]-14,14-bis[[3-[[3-[[5-[[2-(acetylamino)-2-deoxy-b eta-D-galactopyranosyl]oxy]-1-oxopentyl]amino]propyl]amino] -3-oxopropoxy]methyl]-1,12,19,25-tetraoxo-16-oxa-13,20,24-t riazanonacos-1-yl]-4-hydroxy-2-pyrrolidinyl)methyl ester
tcaaaggttcttgtttaacta

SEQ ID NO: 1955 - RNA, 21 nt, synthetic construct
  source 1..21: mol_type = other RNA
  modified_base 1: mod_base = OTHER; note = 2'-O-methylguanosine-3'-phosphorothioate
  modified_base 2: mod_base = OTHER; note = 2'-O-methylguanosine-3'-phosphorothioate
  modified_base 3: mod_base = OTHER; note = 2'-O-methyluridine-3'-phosphate
  modified_base 4: mod_base = OTHER; note = 2'-O-methyluridine-3'-phosphate
  modified_base 5: mod_base = OTHER; note = 2'-O-methylcytidine-3'-phosphate
  modified_base 6: mod_base = OTHER; note = 2'-O-methyluridine-3'-phosphate
  modified_base 7: mod_base = OTHER; note = 2'-deoxy-2'-fluorouridine-3'-phosphate
  modified_base 8: mod_base = OTHER; note = 2'-O-methylguanosine-3'-phosphate
  modified_base 9: mod_base = OTHER; note = 2'-deoxy-2'-fluorouridine-3'-phosphate
  modified_base 10: mod_base = OTHER; note = 2'-deoxy-2'-fluorouridine-3'-phosphate
  modified_base 11: mod_base = OTHER; note = 2'-deoxy-2'-fluorouridine-3'-phosphate
  modified_base 12: mod_base = OTHER; note = 2'-O-methyladenosine-3'-phosphate
  modified_base 13: mod_base = OTHER; note = 2'-O-methyladenosine-3'-phosphate
  modified_base 14: mod_base = OTHER; note = 2'-O-methylcytidine-3'-phosphate
  modified_base 15: mod_base = OTHER; note = 2'-O-methyluridine-3'-phosphate
  modified_base 16: mod_base = OTHER; note = 2'-O-methyluridine-3'-phosphate
  modified_base 17: mod_base = OTHER; note = 2'-O-methylguanosine-3'-phosphate
  modified_base 18: mod_base = OTHER; note = 2'-O-methyluridine-3'-phosphate
  modified_base 19: mod_base = OTHER; note = 2'-O-methyluridine-3'-phosphate
  modified_base 20: mod_base = OTHER; note = 2'-O-methyladenosine-3'-phosphate
  modified_base 21: mod_base = OTHER; note = 2'-O-methyladenosine-3'-phosphate ((2S,4R)-1-[29-[[2-(acetylamino)-2-deoxy-beta-D-galactopyra nosyl]oxy]-14,14-bis[[3-[[3-[[5-[[2-(acetylamino)-2-deoxy-b eta-D-galactopyranosyl]oxy]-1-oxopentyl]amino]propyl]amino] -3-oxopropoxy]methyl]-1,12,19,25-tetraoxo-16-oxa-13,20,24-t riazanonacos-1-yl]-4-hydroxy-2-pyrrolidinyl)methyl ester
ggttcttgtttaacttgttaa

SEQ ID NO: 1956 - RNA, 21 nt, synthetic construct
  source 1..21: mol_type = other RNA
  modified_base 1: mod_base = OTHER; note = 2'-O-methylguanosine-3'-phosphorothioate
  modified_base 2: mod_base = OTHER; note = 2'-O-methyluridine-3'-phosphorothioate
  modified_base 3: mod_base = OTHER; note = 2'-O-methyluridine-3'-phosphate
  modified_base 4: mod_base = OTHER; note = 2'-O-methylcytidine-3'-phosphate
  modified_base 5: mod_base = OTHER; note = 2'-O-methyluridine-3'-phosphate
  modified_base 6: mod_base = OTHER; note = 2'-O-methyluridine-3'-phosphate
  modified_base 7: mod_base = OTHER; note = 2'-deoxy-2'-fluoroguanosine-3'-phosphate
  modified_base 8: mod_base = OTHER; note = 2'-O-methyluridine-3'-phosphate
  modified_base 9: mod_base = OTHER; note = 2'-deoxy-2'-fluorouridine-3'-phosphate
  modified_base 10: mod_base = OTHER; note = 2'-deoxy-2'-fluorouridine-3'-phosphate
  modified_base 11: mod_base = OTHER; note = 2'-deoxy-2'-fluoroadenosine-3'-phosphate
  modified_base 12: mod_base = OTHER; note = 2'-O-methyladenosine-3'-phosphate
  modified_base 13: mod_base = OTHER; note = 2'-O-methylcytidine-3'-phosphate
  modified_base 14: mod_base = OTHER; note = 2'-O-methyluridine-3'-phosphate
  modified_base 15: mod_base = OTHER; note = 2'-O-methyluridine-3'-phosphate
  modified_base 16: mod_base = OTHER; note = 2'-O-methylguanosine-3'-phosphate
  modified_base 17: mod_base = OTHER; note = 2'-O-methyluridine-3'-phosphate
  modified_base 18: mod_base = OTHER; note = 2'-O-methyluridine-3'-phosphate
  modified_base 19: mod_base = OTHER; note = 2'-O-methyladenosine-3'-phosphate
  modified_base 20: mod_base = OTHER; note = 2'-O-methylguanosine-3'-phosphate
  modified_base 21: mod_base = OTHER; note = 2'-O-methyladenosine-3'-phosphate ((2S,4R)-1-[29-[[2-(acetylamino)-2-deoxy-beta-D-galactopyra nosyl]oxy]-14,14-bis[[3-[[3-[[5-[[2-(acetylamino)-2-deoxy-b eta-D-galactopyranosyl]oxy]-1-oxopentyl]amino]propyl]amino] -3-oxopropoxy]methyl]-1,12,19,25-tetraoxo-16-oxa-13,20,24-t riazanonacos-1-yl]-4-hydroxy-2-pyrrolidinyl)methyl ester
gttcttgtttaacttgttaga

SEQ ID NO: 1957 - RNA, 21 nt, synthetic construct
  source 1..21: mol_type = other RNA
  modified_base 1: mod_base = OTHER; note = 2'-O-methyluridine-3'-phosphorothioate
  modified_base 2: mod_base = OTHER; note = 2'-O-methyluridine-3'-phosphorothioate
  modified_base 3: mod_base = OTHER; note = 2'-O-methylcytidine-3'-phosphate
  modified_base 4: mod_base = OTHER; note = 2'-O-methyluridine-3'-phosphate
  modified_base 5: mod_base = OTHER; note = 2'-O-methyluridine-3'-phosphate
  modified_base 6: mod_base = OTHER; note = 2'-O-methylguanosine-3'-phosphate
  modified_base 7: mod_base = OTHER; note = 2'-deoxy-2'-fluorouridine-3'-phosphate
  modified_base 8: mod_base = OTHER; note = 2'-O-methyluridine-3'-phosphate
  modified_base 9: mod_base = OTHER; note = 2'-deoxy-2'-fluorouridine-3'-phosphate
  modified_base 10: mod_base = OTHER; note = 2'-deoxy-2'-fluoroadenosine-3'-phosphate
  modified_base 11: mod_base = OTHER; note = 2'-deoxy-2'-fluoroadenosine-3'-phosphate
  modified_base 12: mod_base = OTHER; note = 2'-O-methylcytidine-3'-phosphate
  modified_base 13: mod_base = OTHER; note = 2'-O-methyluridine-3'-phosphate
  modified_base 14: mod_base = OTHER; note = 2'-O-methyluridine-3'-phosphate
  modified_base 15: mod_base = OTHER; note = 2'-O-methylguanosine-3'-phosphate
  modified_base 16: mod_base = OTHER; note = 2'-O-methyluridine-3'-phosphate
  modified_base 17: mod_base = OTHER; note = 2'-O-methyluridine-3'-phosphate
  modified_base 18: mod_base = OTHER; note = 2'-O-methyladenosine-3'-phosphate
  modified_base 19: mod_base = OTHER; note = 2'-O-methylguanosine-3'-phosphate
  modified_base 20: mod_base = OTHER; note = 2'-O-methyladenosine-3'-phosphate
  modified_base 21: mod_base = OTHER; note = 2'-O-methyladenosine-3'-phosphate ((2S,4R)-1-[29-[[2-(acetylamino)-2-deoxy-beta-D-galactopyra nosyl]oxy]-14,14-bis[[3-[[3-[[5-[[2-(acetylamino)-2-deoxy-b eta-D-galactopyranosyl]oxy]-1-oxopentyl]amino]propyl]amino] -3-oxopropoxy]methyl]-1,12,19,25-tetraoxo-16-oxa-13,20,24-t riazanonacos-1-yl]-4-hydroxy-2-pyrrolidinyl)methyl ester
ttcttgtttaacttgttagaa

SEQ ID NO: 1958 - RNA, 21 nt, synthetic construct
  source 1..21: mol_type = other RNA
  modified_base 1: mod_base = OTHER; note = 2'-O-methylguanosine-3'-phosphorothioate
  modified_base 2: mod_base = OTHER; note = 2'-O-methylcytidine-3'-phosphorothioate
  modified_base 3: mod_base = OTHER; note = 2'-O-methyluridine-3'-phosphate
  modified_base 4: mod_base = OTHER; note = 2'-O-methyluridine-3'-phosphate
  modified_base 5: mod_base = OTHER; note = 2'-O-methyluridine-3'-phosphate
  modified_base 6: mod_base = OTHER; note = 2'-O-methylguanosine-3'-phosphate
  modified_base 7: mod_base = OTHER; note = 2'-deoxy-2'-fluoroguanosine-3'-phosphate
  modified_base 8: mod_base = OTHER; note = 2'-O-methyladenosine-3'-phosphate
  modified_base 9: mod_base = OTHER; note = 2'-deoxy-2'-fluoroguanosine-3'-phosphate
  modified_base 10: mod_base = OTHER; note = 2'-deoxy-2'-fluoroadenosine-3'-phosphate
  modified_base 11: mod_base = OTHER; note = 2'-deoxy-2'-fluoroadenosine-3'-phosphate
  modified_base 12: mod_base = OTHER; note = 2'-O-methyladenosine-3'-phosphate
  modified_base 13: mod_base = OTHER; note = 2'-O-methyluridine-3'-phosphate
  modified_base 14: mod_base = OTHER; note = 2'-O-methylcytidine-3'-phosphate
  modified_base 15: mod_base = OTHER; note = 2'-O-methyladenosine-3'-phosphate
  modified_base 16: mod_base = OTHER; note = 2'-O-methyladenosine-3'-phosphate
  modified_base 17: mod_base = OTHER; note = 2'-O-methyluridine-3'-phosphate
  modified_base 18: mod_base = OTHER; note = 2'-O-methyluridine-3'-phosphate
  modified_base 19: mod_base = OTHER; note = 2'-O-methyladenosine-3'-phosphate
  modified_base 20: mod_base = OTHER; note = 2'-O-methyladenosine-3'-phosphate
  modified_base 21: mod_base = OTHER; note = 2'-O-methyladenosine-3'-phosphate ((2S,4R)-1-[29-[[2-(acetylamino)-2-deoxy-beta-D-galactopyra nosyl]oxy]-14,14-bis[[3-[[3-[[5-[[2-(acetylamino)-2-deoxy-b eta-D-galactopyranosyl]oxy]-1-oxopentyl]amino]propyl]amino] -3-oxopropoxy]methyl]-1,12,19,25-tetraoxo-16-oxa-13,20,24-t riazanonacos-1-yl]-4-hydroxy-2-pyrrolidinyl)methyl ester
gctttggagaaatcaattaaa

SEQ ID NO: 1959 - RNA, 21 nt, synthetic construct
  source 1..21: mol_type = other RNA
  modified_base 1: mod_base = OTHER; note = 2'-O-methylcytidine-3'-phosphorothioate
  modified_base 2: mod_base = OTHER; note = 2'-O-methyluridine-3'-phosphorothioate
  modified_base 3: mod_base = OTHER; note = 2'-O-methyluridine-3'-phosphate
  modified_base 4: mod_base = OTHER; note = 2'-O-methyluridine-3'-phosphate
  modified_base 5: mod_base = OTHER; note = 2'-O-methylguanosine-3'-phosphate
  modified_base 6: mod_base = OTHER; note = 2'-O-methylguanosine-3'-phosphate
  modified_base 7: mod_base = OTHER; note = 2'-deoxy-2'-fluoroadenosine-3'-phosphate
  modified_base 8: mod_base = OTHER; note = 2'-O-methylguanosine-3'-phosphate
  modified_base 9: mod_base = OTHER; note = 2'-deoxy-2'-fluoroadenosine-3'-phosphate
  modified_base 10: mod_base = OTHER; note = 2'-deoxy-2'-fluoroadenosine-3'-phosphate
  modified_base 11: mod_base = OTHER; note = 2'-deoxy-2'-fluoroadenosine-3'-phosphate
  modified_base 12: mod_base = OTHER; note = 2'-O-methyluridine-3'-phosphate
  modified_base 13: mod_base = OTHER; note = 2'-O-methylcytidine-3'-phosphate
  modified_base 14: mod_base = OTHER; note = 2'-O-methyladenosine-3'-phosphate
  modified_base 15: mod_base = OTHER; note = 2'-O-methyladenosine-3'-phosphate
  modified_base 16: mod_base = OTHER; note = 2'-O-methyluridine-3'-phosphate
  modified_base 17: mod_base = OTHER; note = 2'-O-methyluridine-3'-phosphate
  modified_base 18: mod_base = OTHER; note = 2'-O-methyladenosine-3'-phosphate
  modified_base 19: mod_base = OTHER; note = 2'-O-methyladenosine-3'-phosphate
  modified_base 20: mod_base = OTHER; note = 2'-O-methylcytidine-3'-phosphate
  modified_base 21: mod_base = OTHER; note = 2'-O-methyladenosine-3'-phosphate ((2S,4R)-1-[29-[[2-(acetylamino)-2-deoxy-beta-D-galactopyra nosyl]oxy]-14,14-bis[[3-[[3-[[5-[[2-(acetylamino)-2-deoxy-b eta-D-galactopyranosyl]oxy]-1-oxopentyl]amino]propyl]amino] -3-oxopropoxy]methyl]-1,12,19,25-tetraoxo-16-oxa-13,20,24-t riazanonacos-1-yl]-4-hydroxy-2-pyrrolidinyl)methyl ester
ctttggagaaatcaattaaca

SEQ ID NO: 1960 - RNA, 21 nt, synthetic construct
  source 1..21: mol_type = other RNA
  modified_base 1: mod_base = OTHER; note = 2'-O-methyluridine-3'-phosphorothioate
  modified_base 2: mod_base = OTHER; note = 2'-O-methyluridine-3'-phosphorothioate
  modified_base 3: mod_base = OTHER; note = 2'-O-methyluridine-3'-phosphate
  modified_base 4: mod_base = OTHER; note = 2'-O-methylguanosine-3'-phosphate
  modified_base 5: mod_base = OTHER; note = 2'-O-methylguanosine-3'-phosphate
  modified_base 6: mod_base = OTHER; note = 2'-O-methyladenosine-3'-phosphate
  modified_base 7: mod_base = OTHER; note = 2'-deoxy-2'-fluoroguanosine-3'-phosphate
  modified_base 8: mod_base = OTHER; note = 2'-O-methyladenosine-3'-phosphate
  modified_base 9: mod_base = OTHER; note = 2'-deoxy-2'-fluoroadenosine-3'-phosphate
  modified_base 10: mod_base = OTHER; note = 2'-deoxy-2'-fluoroadenosine-3'-phosphate
  modified_base 11: mod_base = OTHER; note = 2'-deoxy-2'-fluorouridine-3'-phosphate
  modified_base 12: mod_base = OTHER; note = 2'-O-methylcytidine-3'-phosphate
  modified_base 13: mod_base = OTHER; note = 2'-O-methyladenosine-3'-phosphate
  modified_base 14: mod_base = OTHER; note = 2'-O-methyladenosine-3'-phosphate
  modified_base 15: mod_base = OTHER; note = 2'-O-methyluridine-3'-phosphate
  modified_base 16: mod_base = OTHER; note = 2'-O-methyluridine-3'-phosphate
  modified_base 17: mod_base = OTHER; note = 2'-O-methyladenosine-3'-phosphate
  modified_base 18: mod_base = OTHER; note = 2'-O-methyladenosine-3'-phosphate
  modified_base 19: mod_base = OTHER; note = 2'-O-methylcytidine-3'-phosphate
  modified_base 20: mod_base = OTHER; note = 2'-O-methyladenosine-3'-phosphate
  modified_base 21: mod_base = OTHER; note = 2'-O-methyladenosine-3'-phosphate ((2S,4R)-1-[29-[[2-(acetylamino)-2-deoxy-beta-D-galactopyra nosyl]oxy]-14,14-bis[[3-[[3-[[5-[[2-(acetylamino)-2-deoxy-b eta-D-galactopyranosyl]oxy]-1-oxopentyl]amino]propyl]amino] -3-oxopropoxy]methyl]-1,12,19,25-tetraoxo-16-oxa-13,20,24-t riazanonacos-1-yl]-4-hydroxy-2-pyrrolidinyl)methyl ester
tttggagaaatcaattaacaa

SEQ ID NO: 1961 - RNA, 21 nt, synthetic construct
  source 1..21: mol_type = other RNA
  modified_base 1: mod_base = OTHER; note = 2'-O-methyluridine-3'-phosphorothioate
  modified_base 2: mod_base = OTHER; note = 2'-O-methyluridine-3'-phosphorothioate
  modified_base 3: mod_base = OTHER; note = 2'-O-methylguanosine-3'-phosphate
  modified_base 4: mod_base = OTHER; note = 2'-O-methylguanosine-3'-phosphate
  modified_base 5: mod_base = OTHER; note = 2'-O-methyladenosine-3'-phosphate
  modified_base 6: mod_base = OTHER; note = 2'-O-methylguanosine-3'-phosphate
  modified_base 7: mod_base = OTHER; note = 2'-deoxy-2'-fluoroadenosine-3'-phosphate
  modified_base 8: mod_base = OTHER; note = 2'-O-methyladenosine-3'-phosphate
  modified_base 9: mod_base = OTHER; note = 2'-deoxy-2'-fluoroadenosine-3'-phosphate
  modified_base 10: mod_base = OTHER; note = 2'-deoxy-2'-fluorouridine-3'-phosphate
  modified_base 11: mod_base = OTHER; note = 2'-deoxy-2'-fluorocytidine-3'-phosphate
  modified_base 12: mod_base = OTHER; note = 2'-O-methyladenosine-3'-phosphate
  modified_base 13: mod_base = OTHER; note = 2'-O-methyladenosine-3'-phosphate
  modified_base 14: mod_base = OTHER; note = 2'-O-methyluridine-3'-phosphate
  modified_base 15: mod_base = OTHER; note = 2'-O-methyluridine-3'-phosphate
  modified_base 16: mod_base = OTHER; note = 2'-O-methyladenosine-3'-phosphate
  modified_base 17: mod_base = OTHER; note = 2'-O-methyladenosine-3'-phosphate
  modified_base 18: mod_base = OTHER; note = 2'-O-methylcytidine-3'-phosphate
  modified_base 19: mod_base = OTHER; note = 2'-O-methyladenosine-3'-phosphate
  modified_base 20: mod_base = OTHER; note = 2'-O-methyladenosine-3'-phosphate
  modified_base 21: mod_base = OTHER; note = 2'-O-methyladenosine-3'-phosphate ((2S,4R)-1-[29-[[2-(acetylamino)-2-deoxy-beta-D-galactopyra nosyl]oxy]-14,14-bis[[3-[[3-[[5-[[2-(acetylamino)-2-deoxy-b eta-D-galactopyranosyl]oxy]-1-oxopentyl]amino]propyl]amino] -3-oxopropoxy]methyl]-1,12,19,25-tetraoxo-16-oxa-13,20,24-t riazanonacos-1-yl]-4-hydroxy-2-pyrrolidinyl)methyl ester
ttggagaaatcaattaacaaa

SEQ ID NO: 1962 - RNA, 21 nt, synthetic construct
  source 1..21: mol_type = other RNA
  modified_base 1: mod_base = OTHER; note = 2'-O-methylcytidine-3'-phosphorothioate
  modified_base 2: mod_base = OTHER; note = 2'-O-methylcytidine-3'-phosphorothioate
  modified_base 3: mod_base = OTHER; note = 2'-O-methyladenosine-3'-phosphate
  modified_base 4: mod_base = OTHER; note = 2'-O-methylguanosine-3'-phosphate
  modified_base 5: mod_base = OTHER; note = 2'-O-methylguanosine-3'-phosphate
  modified_base 6: mod_base = OTHER; note = 2'-O-methylguanosine-3'-phosphate
  modified_base 7: mod_base = OTHER; note = 2'-deoxy-2'-fluorouridine-3'-phosphate
  modified_base 8: mod_base = OTHER; note = 2'-O-methyluridine-3'-phosphate
  modified_base 9: mod_base = OTHER; note = 2'-deoxy-2'-fluorouridine-3'-phosphate
  modified_base 10: mod_base = OTHER; note = 2'-deoxy-2'-fluorouridine-3'-phosphate
  modified_base 11: mod_base = OTHER; note = 2'-deoxy-2'-fluorocytidine-3'-phosphate
  modified_base 12: mod_base = OTHER; note = 2'-O-methyluridine-3'-phosphate
  modified_base 13: mod_base = OTHER; note = 2'-O-methylguanosine-3'-phosphate
  modified_base 14: mod_base = OTHER; note = 2'-O-methyluridine-3'-phosphate
  modified_base 15: mod_base = OTHER; note = 2'-O-methyladenosine-3'-phosphate
  modified_base 16: mod_base = OTHER; note = 2'-O-methyluridine-3'-phosphate
  modified_base 17: mod_base = OTHER; note = 2'-O-methyluridine-3'-phosphate
  modified_base 18: mod_base = OTHER; note = 2'-O-methylguanosine-3'-phosphate
  modified_base 19: mod_base = OTHER; note = 2'-O-methyluridine-3'-phosphate
  modified_base 20: mod_base = OTHER; note = 2'-O-methyluridine-3'-phosphate
  modified_base 21: mod_base = OTHER; note = 2'-O-methyladenosine-3'-phosphate ((2S,4R)-1-[29-[[2-(acetylamino)-2-deoxy-beta-D-galactopyra nosyl]oxy]-14,14-bis[[3-[[3-[[5-[[2-(acetylamino)-2-deoxy-b eta-D-galactopyranosyl]oxy]-1-oxopentyl]amino]propyl]amino] -3-oxopropoxy]methyl]-1,12,19,25-tetraoxo-16-oxa-13,20,24-t riazanonacos-1-yl]-4-hydroxy-2-pyrrolidinyl)methyl ester
ccagggttttctgtattgtta

SEQ ID NO: 1963 - RNA, 21 nt, synthetic construct
  source 1..21: mol_type = other RNA
  modified_base 1: mod_base = OTHER; note = 2'-O-methylcytidine-3'-phosphorothioate
  modified_base 2: mod_base = OTHER; note = 2'-O-methyladenosine-3'-phosphorothioate
  modified_base 3: mod_base = OTHER; note = 2'-O-methylguanosine-3'-phosphate
  modified_base 4: mod_base = OTHER; note = 2'-O-methylguanosine-3'-phosphate
  modified_base 5: mod_base = OTHER; note = 2'-O-methylguanosine-3'-phosphate
  modified_base 6: mod_base = OTHER; note = 2'-O-methyluridine-3'-phosphate
  modified_base 7: mod_base = OTHER; note = 2'-deoxy-2'-fluorouridine-3'-phosphate
  modified_base 8: mod_base = OTHER; note = 2'-O-methyluridine-3'-phosphate
  modified_base 9: mod_base = OTHER; note = 2'-deoxy-2'-fluorouridine-3'-phosphate
  modified_base 10: mod_base = OTHER; note = 2'-deoxy-2'-fluorocytidine-3'-phosphate
  modified_base 11: mod_base = OTHER; note = 2'-deoxy-2'-fluorouridine-3'-phosphate
  modified_base 12: mod_base = OTHER; note = 2'-O-methylguanosine-3'-phosphate
  modified_base 13: mod_base = OTHER; note = 2'-O-methyluridine-3'-phosphate
  modified_base 14: mod_base = OTHER; note = 2'-O-methyladenosine-3'-phosphate
  modified_base 15: mod_base = OTHER; note = 2'-O-methyluridine-3'-phosphate
  modified_base 16: mod_base = OTHER; note = 2'-O-methyluridine-3'-phosphate
  modified_base 17: mod_base = OTHER; note = 2'-O-methylguanosine-3'-phosphate
  modified_base 18: mod_base = OTHER; note = 2'-O-methyluridine-3'-phosphate
  modified_base 19: mod_base = OTHER; note = 2'-O-methyluridine-3'-phosphate
  modified_base 20: mod_base = OTHER; note = 2'-O-methyluridine-3'-phosphate
  modified_base 21: mod_base = OTHER; note = 2'-O-methyladenosine-3'-phosphate ((2S,4R)-1-[29-[[2-(acetylamino)-2-deoxy-beta-D-galactopyra nosyl]oxy]-14,14-bis[[3-[[3-[[5-[[2-(acetylamino)-2-deoxy-b eta-D-galactopyranosyl]oxy]-1-oxopentyl]amino]propyl]amino] -3-oxopropoxy]methyl]-1,12,19,25-tetraoxo-16-oxa-13,20,24-t riazanonacos-1-yl]-4-hydroxy-2-pyrrolidinyl)methyl ester
cagggttttctgtattgttta

SEQ ID NO: 1964 - RNA, 21 nt, synthetic construct
  source 1..21: mol_type = other RNA
  modified_base 1: mod_base = OTHER; note = 2'-O-methyluridine-3'-phosphorothioate
  modified_base 2: mod_base = OTHER; note = 2'-O-methyladenosine-3'-phosphorothioate
  modified_base 3: mod_base = OTHER; note = 2'-O-methylguanosine-3'-phosphate
  modified_base 4: mod_base = OTHER; note = 2'-O-methylcytidine-3'-phosphate
  modified_base 5: mod_base = OTHER; note = 2'-O-methyladenosine-3'-phosphate
  modified_base 6: mod_base = OTHER; note = 2'-O-methyladenosine-3'-phosphate
  modified_base 7: mod_base = OTHER; note = 2'-deoxy-2'-fluorouridine-3'-phosphate
  modified_base 8: mod_base = OTHER; note = 2'-O-methylguanosine-3'-phosphate
  modified_base 9: mod_base = OTHER; note = 2'-deoxy-2'-fluorouridine-3'-phosphate
  modified_base 10: mod_base = OTHER; note = 2'-deoxy-2'-fluorouridine-3'-phosphate
  modified_base 11: mod_base = OTHER; note = 2'-deoxy-2'-fluorouridine-3'-phosphate
  modified_base 12: mod_base = OTHER; note = 2'-O-methylguanosine-3'-phosphate
  modified_base 13: mod_base = OTHER; note = 2'-O-methylguanosine-3'-phosphate
  modified_base 14: mod_base = OTHER; note = 2'-O-methyladenosine-3'-phosphate
  modified_base 15: mod_base = OTHER; note = 2'-O-methyluridine-3'-phosphate
  modified_base 16: mod_base = OTHER; note = 2'-O-methyladenosine-3'-phosphate
  modified_base 17: mod_base = OTHER; note = 2'-O-methyladenosine-3'-phosphate
  modified_base 18: mod_base = OTHER; note = 2'-O-methylcytidine-3'-phosphate
  modified_base 19: mod_base = OTHER; note = 2'-O-methyluridine-3'-phosphate
  modified_base 20: mod_base = OTHER; note = 2'-O-methyluridine-3'-phosphate
  modified_base 21: mod_base = OTHER; note = 2'-O-methyladenosine-3'-phosphate ((2S,4R)-1-[29-[[2-(acetylamino)-2-deoxy-beta-D-galactopyra nosyl]oxy]-14,14-bis[[3-[[3-[[5-[[2-(acetylamino)-2-deoxy-b eta-D-galactopyranosyl]oxy]-1-oxopentyl]amino]propyl]amino] -3-oxopropoxy]methyl]-1,12,19,25-tetraoxo-16-oxa-13,20,24-t riazanonacos-1-yl]-4-hydroxy-2-pyrrolidinyl)methyl ester
tagcaatgtttggataactta

SEQ ID NO: 1965 - RNA, 21 nt, synthetic construct
  source 1..21: mol_type = other RNA
  modified_base 1: mod_base = OTHER; note = 2'-O-methyladenosine-3'-phosphorothioate
  modified_base 2: mod_base = OTHER; note = 2'-O-methyladenosine-3'-phosphorothioate
  modified_base 3: mod_base = OTHER; note = 2'-O-methyluridine-3'-phosphate
  modified_base 4: mod_base = OTHER; note = 2'-O-methylguanosine-3'-phosphate
  modified_base 5: mod_base = OTHER; note = 2'-O-methylguanosine-3'-phosphate
  modified_base 6: mod_base = OTHER; note = 2'-O-methyladenosine-3'-phosphate
  modified_base 7: mod_base = OTHER; note = 2'-deoxy-2'-fluorocytidine-3'-phosphate
  modified_base 8: mod_base = OTHER; note = 2'-O-methyluridine-3'-phosphate
  modified_base 9: mod_base = OTHER; note = 2'-deoxy-2'-fluorouridine-3'-phosphate
  modified_base 10: mod_base = OTHER; note = 2'-deoxy-2'-fluorocytidine-3'-phosphate
  modified_base 11: mod_base = OTHER; note = 2'-deoxy-2'-fluoroadenosine-3'-phosphate
  modified_base 12: mod_base = OTHER; note = 2'-O-methylcytidine-3'-phosphate
  modified_base 13: mod_base = OTHER; note = 2'-O-methyladenosine-3'-phosphate
  modified_base 14: mod_base = OTHER; note = 2'-O-methylcytidine-3'-phosphate
  modified_base 15: mod_base = OTHER; note = 2'-O-methyladenosine-3'-phosphate
  modified_base 16: mod_base = OTHER; note = 2'-O-methyluridine-3'-phosphate
  modified_base 17: mod_base = OTHER; note = 2'-O-methyluridine-3'-phosphate
  modified_base 18: mod_base = OTHER; note = 2'-O-methyluridine-3'-phosphate
  modified_base 19: mod_base = OTHER; note = 2'-O-methyladenosine-3'-phosphate
  modified_base 20: mod_base = OTHER; note = 2'-O-methyladenosine-3'-phosphate
  modified_base 21: mod_base = OTHER; note = 2'-O-methyladenosine-3'-phosphate ((2S,4R)-1-[29-[[2-(acetylamino)-2-deoxy-beta-D-galactopyra nosyl]oxy]-14,14-bis[[3-[[3-[[5-[[2-(acetylamino)-2-deoxy-b eta-D-galactopyranosyl]oxy]-1-oxopentyl]amino]propyl]amino] -3-oxopropoxy]methyl]-1,12,19,25-tetraoxo-16-oxa-13,20,24-t riazanonacos-1-yl]-4-hydroxy-2-pyrrolidinyl)methyl ester
aatggacttcacacatttaaa

SEQ ID NO: 1966 - RNA, 21 nt, synthetic construct
  source 1..21: mol_type = other RNA
  modified_base 1: mod_base = OTHER; note = 2'-O-methyladenosine-3'-phosphorothioate
  modified_base 2: mod_base = OTHER; note = 2'-O-methyluridine-3'-phosphorothioate
  modified_base 3: mod_base = OTHER; note = 2'-O-methylguanosine-3'-phosphate
  modified_base 4: mod_base = OTHER; note = 2'-O-methylguanosine-3'-phosphate
  modified_base 5: mod_base = OTHER; note = 2'-O-methyladenosine-3'-phosphate
  modified_base 6: mod_base = OTHER; note = 2'-O-methylcytidine-3'-phosphate
  modified_base 7: mod_base = OTHER; note = 2'-deoxy-2'-fluorouridine-3'-phosphate
  modified_base 8: mod_base = OTHER; note = 2'-O-methyluridine-3'-phosphate
  modified_base 9: mod_base = OTHER; note = 2'-deoxy-2'-fluorocytidine-3'-phosphate
  modified_base 10: mod_base = OTHER; note = 2'-deoxy-2'-fluoroadenosine-3'-phosphate
  modified_base 11: mod_base = OTHER; note = 2'-deoxy-2'-fluorocytidine-3'-phosphate
  modified_base 12: mod_base = OTHER; note = 2'-O-methyladenosine-3'-phosphate
  modified_base 13: mod_base = OTHER; note = 2'-O-methylcytidine-3'-phosphate
  modified_base 14: mod_base = OTHER; note = 2'-O-methyladenosine-3'-phosphate
  modified_base 15: mod_base = OTHER; note = 2'-O-methyluridine-3'-phosphate
  modified_base 16: mod_base = OTHER; note = 2'-O-methyluridine-3'-phosphate
  modified_base 17: mod_base = OTHER; note = 2'-O-methyluridine-3'-phosphate
  modified_base 18: mod_base = OTHER; note = 2'-O-methyladenosine-3'-phosphate
  modified_base 19: mod_base = OTHER; note = 2'-O-methyladenosine-3'-phosphate
  modified_base 20: mod_base = OTHER; note = 2'-O-methyladenosine-3'-phosphate
  modified_base 21: mod_base = OTHER; note = 2'-O-methyladenosine-3'-phosphate ((2S,4R)-1-[29-[[2-(acetylamino)-2-deoxy-beta-D-galactopyra nosyl]oxy]-14,14-bis[[3-[[3-[[5-[[2-(acetylamino)-2-deoxy-b eta-D-galactopyranosyl]oxy]-1-oxopentyl]amino]propyl]amino] -3-oxopropoxy]methyl]-1,12,19,25-tetraoxo-16-oxa-13,20,24-t riazanonacos-1-yl]-4-hydroxy-2-pyrrolidinyl)methyl ester
atggacttcacacatttaaaa

SEQ ID NO: 1967 - RNA, 21 nt, synthetic construct
  source 1..21: mol_type = other RNA
  modified_base 1: mod_base = OTHER; note = 2'-O-methyluridine-3'-phosphorothioate
  modified_base 2: mod_base = OTHER; note = 2'-O-methylguanosine-3'-phosphorothioate
  modified_base 3: mod_base = OTHER; note = 2'-O-methyluridine-3'-phosphate
  modified_base 4: mod_base = OTHER; note = 2'-O-methylguanosine-3'-phosphate
  modified_base 5: mod_base = OTHER; note = 2'-O-methyluridine-3'-phosphate
  modified_base 6: mod_base = OTHER; note = 2'-O-methyluridine-3'-phosphate
  modified_base 7: mod_base = OTHER; note = 2'-deoxy-2'-fluorocytidine-3'-phosphate
  modified_base 8: mod_base = OTHER; note = 2'-O-methylcytidine-3'-phosphate
  modified_base 9: mod_base = OTHER; note = 2'-deoxy-2'-fluorouridine-3'-phosphate
  modified_base 10: mod_base = OTHER; note = 2'-deoxy-2'-fluorouridine-3'-phosphate
  modified_base 11: mod_base = OTHER; note = 2'-deoxy-2'-fluorouridine-3'-phosphate
  modified_base 12: mod_base = OTHER; note = 2'-O-methyluridine-3'-phosphate
  modified_base 13: mod_base = OTHER; note = 2'-O-methylguanosine-3'-phosphate
  modified_base 14: mod_base = OTHER; note = 2'-O-methyluridine-3'-phosphate
  modified_base 15: mod_base = OTHER; note = 2'-O-methyluridine-3'-phosphate
  modified_base 16: mod_base = OTHER; note = 2'-O-methyluridine-3'-phosphate
  modified_base 17: mod_base = OTHER; note = 2'-O-methylcytidine-3'-phosphate
  modified_base 18: mod_base = OTHER; note = 2'-O-methyluridine-3'-phosphate
  modified_base 19: mod_base = OTHER; note = 2'-O-methyladenosine-3'-phosphate
  modified_base 20: mod_base = OTHER; note = 2'-O-methyladenosine-3'-phosphate
  modified_base 21: mod_base = OTHER; note = 2'-O-methyladenosine-3'-phosphate ((2S,4R)-1-[29-[[2-(acetylamino)-2-deoxy-beta-D-galactopyra nosyl]oxy]-14,14-bis[[3-[[3-[[5-[[2-(acetylamino)-2-deoxy-b eta-D-galactopyranosyl]oxy]-1-oxopentyl]amino]propyl]amino] -3-oxopropoxy]methyl]-1,12,19,25-tetraoxo-16-oxa-13,20,24-t riazanonacos-1-yl]-4-hydroxy-2-pyrrolidinyl)methyl ester
tgtgttccttttgtttctaaa

SEQ ID NO: 1968 - RNA, 21 nt, synthetic construct
  source 1..21: mol_type = other RNA
  modified_base 1: mod_base = OTHER; note = 2'-O-methylcytidine-3'-phosphorothioate
  modified_base 2: mod_base = OTHER; note = 2'-O-methylguanosine-3'-phosphorothioate
  modified_base 3: mod_base = OTHER; note = 2'-O-methyluridine-3'-phosphate
  modified_base 4: mod_base = OTHER; note = 2'-O-methyladenosine-3'-phosphate
  modified_base 5: mod_base = OTHER; note = 2'-O-methyladenosine-3'-phosphate
  modified_base 6: mod_base = OTHER; note = 2'-O-methylguanosine-3'-phosphate
  modified_base 7: mod_base = OTHER; note = 2'-deoxy-2'-fluoroadenosine-3'-phosphate
  modified_base 8: mod_base = OTHER; note = 2'-O-methylguanosine-3'-phosphate
  modified_base 9: mod_base = OTHER; note = 2'-deoxy-2'-fluorouridine-3'-phosphate
  modified_base 10: mod_base = OTHER; note = 2'-deoxy-2'-fluorouridine-3'-phosphate
  modified_base 11: mod_base = OTHER; note = 2'-deoxy-2'-fluoroguanosine-3'-phosphate
  modified_base 12: mod_base = OTHER; note = 2'-O-methyluridine-3'-phosphate
  modified_base 13: mod_base = OTHER; note = 2'-O-methylguanosine-3'-phosphate
  modified_base 14: mod_base = OTHER; note = 2'-O-methyladenosine-3'-phosphate
  modified_base 15: mod_base = OTHER; note = 2'-O-methyladenosine-3'-phosphate
  modified_base 16: mod_base = OTHER; note = 2'-O-methyluridine-3'-phosphate
  modified_base 17: mod_base = OTHER; note = 2'-O-methyluridine-3'-phosphate
  modified_base 18: mod_base = OTHER; note = 2'-O-methyladenosine-3'-phosphate
  modified_base 19: mod_base = OTHER; note = 2'-O-methylguanosine-3'-phosphate
  modified_base 20: mod_base = OTHER; note = 2'-O-methyladenosine-3'-phosphate
  modified_base 21: mod_base = OTHER; note = 2'-O-methyladenosine-3'-phosphate ((2S,4R)-1-[29-[[2-(acetylamino)-2-deoxy-beta-D-galactopyra nosyl]oxy]-14,14-bis[[3-[[3-[[5-[[2-(acetylamino)-2-deoxy-b eta-D-galactopyranosyl]oxy]-1-oxopentyl]amino]propyl]amino] -3-oxopropoxy]methyl]-1,12,19,25-tetraoxo-16-oxa-13,20,24-t riazanonacos-1-yl]-4-hydroxy-2-pyrrolidinyl)methyl ester
cgtaagagttgtgaattagaa

SEQ ID NO: 1969 - RNA, 21 nt, synthetic construct
  source 1..21: mol_type = other RNA
  modified_base 1: mod_base = OTHER; note = 2'-O-methyluridine-3'-phosphorothioate
  modified_base 2: mod_base = OTHER; note = 2'-O-methylguanosine-3'-phosphorothioate
  modified_base 3: mod_base = OTHER; note = 2'-O-methyladenosine-3'-phosphate
  modified_base 4: mod_base = OTHER; note = 2'-O-methyladenosine-3'-phosphate
  modified_base 5: mod_base = OTHER; note = 2'-O-methylcytidine-3'-phosphate
  modified_base 6: mod_base = OTHER; note = 2'-O-methyluridine-3'-phosphate
  modified_base 7: mod_base = OTHER; note = 2'-deoxy-2'-fluorocytidine-3'-phosphate
  modified_base 8: mod_base = OTHER; note = 2'-O-methyladenosine-3'-phosphate
  modified_base 9: mod_base = OTHER; note = 2'-deoxy-2'-fluoroadenosine-3'-phosphate
  modified_base 10: mod_base = OTHER; note = 2'-deoxy-2'-fluoroguanosine-3'-phosphate
  modified_base 11: mod_base = OTHER; note = 2'-deoxy-2'-fluoroadenosine-3'-phosphate
  modified_base 12: mod_base = OTHER; note = 2'-O-methylguanosine-3'-phosphate
  modified_base 13: mod_base = OTHER; note = 2'-O-methyluridine-3'-phosphate
  modified_base 14: mod_base = OTHER; note = 2'-O-methyladenosine-3'-phosphate
  modified_base 15: mod_base = OTHER; note = 2'-O-methyladenosine-3'-phosphate
  modified_base 16: mod_base = OTHER; note = 2'-O-methylguanosine-3'-phosphate
  modified_base 17: mod_base = OTHER; note = 2'-O-methyluridine-3'-phosphate
  modified_base 18: mod_base = OTHER; note = 2'-O-methyluridine-3'-phosphate
  modified_base 19: mod_base = OTHER; note = 2'-O-methyluridine-3'-phosphate
  modified_base 20: mod_base = OTHER; note = 2'-O-methylguanosine-3'-phosphate
  modified_base 21: mod_base = OTHER; note = 2'-O-methyladenosine-3'-phosphate ((2S,4R)-1-[29-[[2-(acetylamino)-2-deoxy-beta-D-galactopyra nosyl]oxy]-14,14-bis[[3-[[3-[[5-[[2-(acetylamino)-2-deoxy-b eta-D-galactopyranosyl]oxy]-1-oxopentyl]amino]propyl]amino] -3-oxopropoxy]methyl]-1,12,19,25-tetraoxo-16-oxa-13,20,24-t riazanonacos-1-yl]-4-hydroxy-2-pyrrolidinyl)methyl ester
tgaactcaagagtaagtttga

SEQ ID NO: 1970 - RNA, 21 nt, synthetic construct
  source 1..21: mol_type = other RNA
  modified_base 1: mod_base = OTHER; note = 2'-O-methylguanosine-3'-phosphorothioate
  modified_base 2: mod_base = OTHER; note = 2'-O-methyladenosine-3'-phosphorothioate
  modified_base 3: mod_base = OTHER; note = 2'-O-methyladenosine-3'-phosphate
  modified_base 4: mod_base = OTHER; note = 2'-O-methylcytidine-3'-phosphate
  modified_base 5: mod_base = OTHER; note = 2'-O-methyluridine-3'-phosphate
  modified_base 6: mod_base = OTHER; note = 2'-O-methylcytidine-3'-phosphate
  modified_base 7: mod_base = OTHER; note = 2'-deoxy-2'-fluoroadenosine-3'-phosphate
  modified_base 8: mod_base = OTHER; note = 2'-O-methyladenosine-3'-phosphate
  modified_base 9: mod_base = OTHER; note = 2'-deoxy-2'-fluoroguanosine-3'-phosphate
  modified_base 10: mod_base = OTHER; note = 2'-deoxy-2'-fluoroadenosine-3'-phosphate
  modified_base 11: mod_base = OTHER; note = 2'-deoxy-2'-fluoroguanosine-3'-phosphate
  modified_base 12: mod_base = OTHER; note = 2'-O-methyluridine-3'-phosphate
  modified_base 13: mod_base = OTHER; note = 2'-O-methyladenosine-3'-phosphate
  modified_base 14: mod_base = OTHER; note = 2'-O-methyladenosine-3'-phosphate
  modified_base 15: mod_base = OTHER; note = 2'-O-methylguanosine-3'-phosphate
  modified_base 16: mod_base = OTHER; note = 2'-O-methyluridine-3'-phosphate
  modified_base 17: mod_base = OTHER; note = 2'-O-methyluridine-3'-phosphate
  modified_base 18: mod_base = OTHER; note = 2'-O-methyluridine-3'-phosphate
  modified_base 19: mod_base = OTHER; note = 2'-O-methylguanosine-3'-phosphate
  modified_base 20: mod_base = OTHER; note = 2'-O-methyladenosine-3'-phosphate
  modified_base 21: mod_base = OTHER; note = 2'-O-methyladenosine-3'-phosphate ((2S,4R)-1-[29-[[2-(acetylamino)-2-deoxy-beta-D-galactopyra nosyl]oxy]-14,14-bis[[3-[[3-[[5-[[2-(acetylamino)-2-deoxy-b eta-D-galactopyranosyl]oxy]-1-oxopentyl]amino]propyl]amino] -3-oxopropoxy]methyl]-1,12,19,25-tetraoxo-16-oxa-13,20,24-t riazanonacos-1-yl]-4-hydroxy-2-pyrrolidinyl)methyl ester
gaactcaagagtaagtttgaa

SEQ ID NO: 1971 - RNA, 21 nt, synthetic construct
  source 1..21: mol_type = other RNA
  modified_base 1: mod_base = OTHER; note = 2'-O-methyladenosine-3'-phosphorothioate
  modified_base 2: mod_base = OTHER; note = 2'-O-methylcytidine-3'-phosphorothioate
  modified_base 3: mod_base = OTHER; note = 2'-O-methyluridine-3'-phosphate
  modified_base 4: mod_base = OTHER; note = 2'-O-methylcytidine-3'-phosphate
  modified_base 5: mod_base = OTHER; note = 2'-O-methyladenosine-3'-phosphate
  modified_base 6: mod_base = OTHER; note = 2'-O-methyladenosine-3'-phosphate
  modified_base 7: mod_base = OTHER; note = 2'-deoxy-2'-fluoroguanosine-3'-phosphate
  modified_base 8: mod_base = OTHER; note = 2'-O-methyladenosine-3'-phosphate
  modified_base 9: mod_base = OTHER; note = 2'-deoxy-2'-fluoroguanosine-3'-phosphate
  modified_base 10: mod_base = OTHER; note = 2'-deoxy-2'-fluorouridine-3'-phosphate
  modified_base 11: mod_base = OTHER; note = 2'-deoxy-2'-fluoroadenosine-3'-phosphate
  modified_base 12: mod_base = OTHER; note = 2'-O-methyladenosine-3'-phosphate
  modified_base 13: mod_base = OTHER; note = 2'-O-methylguanosine-3'-phosphate
  modified_base 14: mod_base = OTHER; note = 2'-O-methyluridine-3'-phosphate
  modified_base 15: mod_base = OTHER; note = 2'-O-methyluridine-3'-phosphate
  modified_base 16: mod_base = OTHER; note = 2'-O-methyluridine-3'-phosphate
  modified_base 17: mod_base = OTHER; note = 2'-O-methylguanosine-3'-phosphate
  modified_base 18: mod_base = OTHER; note = 2'-O-methyladenosine-3'-phosphate
  modified_base 19: mod_base = OTHER; note = 2'-O-methyladenosine-3'-phosphate
  modified_base 20: mod_base = OTHER; note = 2'-O-methyladenosine-3'-phosphate
  modified_base 21: mod_base = OTHER; note = 2'-O-methyladenosine-3'-phosphate ((2S,4R)-1-[29-[[2-(acetylamino)-2-deoxy-beta-D-galactopyra nosyl]oxy]-14,14-bis[[3-[[3-[[5-[[2-(acetylamino)-2-deoxy-b eta-D-galactopyranosyl]oxy]-1-oxopentyl]amino]propyl]amino] -3-oxopropoxy]methyl]-1,12,19,25-tetraoxo-16-oxa-13,20,24-t riazanonacos-1-yl]-4-hydroxy-2-pyrrolidinyl)methyl ester
actcaagagtaagtttgaaaa

SEQ ID NO: 1972 - RNA, 23 nt, synthetic construct
  source 1..23: mol_type = other RNA
  modified_base 1: mod_base = OTHER; note = 2'-O-methyluridine-3'-phosphorothioate 5'-(E)-Vinylphosphonate
  modified_base 2: mod_base = OTHER; note = 2'-deoxy-2'-fluorouridine-3'-phosphorothioate
  modified_base 3: mod_base = OTHER; note = 2'-O-methyladenosine-3'-phosphate
  modified_base 4: mod_base = OTHER; note = 2'-O-methyladenosine-3'-phosphate
  modified_base 5: mod_base = OTHER; note = 2'-O-methyladenosine-3'-phosphate
  modified_base 6: mod_base = OTHER; note = 2'-deoxy-2'-fluoroadenosine-3'-phosphate
  modified_base 7: mod_base = OTHER; note = 2'-O-methylguanosine-3'-phosphate
  modified_base 8: mod_base = OTHER; note = 2'-deoxy-2'-fluoroadenosine-3'-phosphate
  modified_base 9: mod_base = OTHER; note = 2'-deoxy-2'-fluoroguanosine-3'-phosphate
  modified_base 10: mod_base = OTHER; note = 2'-O-methyladenosine-3'-phosphate
  modified_base 11: mod_base = OTHER; note = 2'-O-methylcytidine-3'-phosphate
  modified_base 12: mod_base = OTHER; note = 2'-O-methyladenosine-3'-phosphate
  modified_base 13: mod_base = OTHER; note = 2'-O-methyluridine-3'-phosphate
  modified_base 14: mod_base = OTHER; note = 2'-deoxy-2'-fluorouridine-3'-phosphate
  modified_base 15: mod_base = OTHER; note = 2'-O-methylguanosine-3'-phosphate
  modified_base 16: mod_base = OTHER; note = 2'-deoxy-2'-fluorocytidine-3'-phosphate
  modified_base 17: mod_base = OTHER; note = 2'-O-methyladenosine-3'-phosphate
  modified_base 18: mod_base = OTHER; note = 2'-O-methylcytidine-3'-phosphate
  modified_base 19: mod_base = OTHER; note = 2'-O-methyladenosine-3'-phosphate
  modified_base 20: mod_base = OTHER; note = 2'-O-methyluridine-3'-phosphate
  modified_base 21: mod_base = OTHER; note = 2'-O-methyluridine-3'-phosphorothioate
  modified_base 22: mod_base = OTHER; note = 2'-O-methylguanosine-3'-phosphorothioate
  modified_base 23: mod_base = OTHER; note = 2'-O-methyladenosine
ttaaaagagacattgcacattga

SEQ ID NO: 1973 - RNA, 23 nt, synthetic construct
  source 1..23: mol_type = other RNA
  modified_base 1: mod_base = OTHER; note = 2'-O-methyluridine-3'-phosphorothioate 5'-(E)-Vinylphosphonate
  modified_base 2: mod_base = OTHER; note = 2'-deoxy-2'-fluoroguanosine-3'-phosphorothioate
  modified_base 3: mod_base = OTHER; note = 2'-O-methylcytidine-3'-phosphate
  modified_base 4: mod_base = OTHER; note = 2'-O-methyluridine-3'-phosphate
  modified_base 5: mod_base = OTHER; note = 2'-O-methyladenosine-3'-phosphate
  modified_base 6: mod_base = OTHER; note = 2'-deoxy-2'-fluoroadenosine-3'-phosphate
  modified_base 7: mod_base = OTHER; note = 2'-O-methyladenosine-3'-phosphate
  modified_base 8: mod_base = OTHER; note = 2'-deoxy-2'-fluoroadenosine-3'-phosphate
  modified_base 9: mod_base = OTHER; note = 2'-deoxy-2'-fluoroguanosine-3'-phosphate
  modified_base 10: mod_base = OTHER; note = 2'-O-methyladenosine-3'-phosphate
  modified_base 11: mod_base = OTHER; note = 2'-O-methylguanosine-3'-phosphate
  modified_base 12: mod_base = OTHER; note = 2'-O-methyladenosine-3'-phosphate
  modified_base 13: mod_base = OTHER; note = 2'-O-methylcytidine-3'-phosphate
  modified_base 14: mod_base = OTHER; note = 2'-deoxy-2'-fluoroadenosine-3'-phosphate
  modified_base 15: mod_base = OTHER; note = 2'-O-methyluridine-3'-phosphate
  modified_base 16: mod_base = OTHER; note = 2'-deoxy-2'-fluorouridine-3'-phosphate
  modified_base 17: mod_base = OTHER; note = 2'-O-methylguanosine-3'-phosphate
  modified_base 18: mod_base = OTHER; note = 2'-O-methylcytidine-3'-phosphate
  modified_base 19: mod_base = OTHER; note = 2'-O-methyladenosine-3'-phosphate
  modified_base 20: mod_base = OTHER; note = 2'-O-methylcytidine-3'-phosphate
  modified_base 21: mod_base = OTHER; note = 2'-O-methyladenosine-3'-phosphorothioate
  modified_base 22: mod_base = OTHER; note = 2'-O-methyluridine-3'-phosphorothioate
  modified_base 23: mod_base = OTHER; note = 2'-O-methyluridine
tgctaaaagagacattgcacatt

SEQ ID NO: 1974 - RNA, 23 nt, synthetic construct
  source 1..23: mol_type = other RNA
  modified_base 1: mod_base = OTHER; note = 2'-O-methyluridine-3'-phosphorothioate 5'-(E)-Vinylphosphonate
  modified_base 2: mod_base = OTHER; note = 2'-deoxy-2'-fluorouridine-3'-phosphorothioate
  modified_base 3: mod_base = OTHER; note = 2'-O-methyluridine-3'-phosphate
  modified_base 4: mod_base = OTHER; note = 2'-O-methylguanosine-3'-phosphate
  modified_base 5: mod_base = OTHER; note = 2'-O-methylcytidine-3'-phosphate
  modified_base 6: mod_base = OTHER; note = 2'-deoxy-2'-fluorouridine-3'-phosphate
  modified_base 7: mod_base = OTHER; note = 2'-O-methyladenosine-3'-phosphate
  modified_base 8: mod_base = OTHER; note = 2'-deoxy-2'-fluoroadenosine-3'-phosphate
  modified_base 9: mod_base = OTHER; note = 2'-deoxy-2'-fluoroadenosine-3'-phosphate
  modified_base 10: mod_base = OTHER; note = 2'-O-methyladenosine-3'-phosphate
  modified_base 11: mod_base = OTHER; note = 2'-O-methylguanosine-3'-phosphate
  modified_base 12: mod_base = OTHER; note = 2'-O-methyladenosine-3'-phosphate
  modified_base 13: mod_base = OTHER; note = 2'-O-methylguanosine-3'-phosphate
  modified_base 14: mod_base = OTHER; note = 2'-deoxy-2'-fluoroadenosine-3'-phosphate
  modified_base 15: mod_base = OTHER; note = 2'-O-methylcytidine-3'-phosphate
  modified_base 16: mod_base = OTHER; note = 2'-deoxy-2'-fluoroadenosine-3'-phosphate
  modified_base 17: mod_base = OTHER; note = 2'-O-methyluridine-3'-phosphate
  modified_base 18: mod_base = OTHER; note = 2'-O-methyluridine-3'-phosphate
  modified_base 19: mod_base = OTHER; note = 2'-O-methylguanosine-3'-phosphate
  modified_base 20: mod_base = OTHER; note = 2'-O-methylcytidine-3'-phosphate
  modified_base 21: mod_base = OTHER; note = 2'-O-methyladenosine-3'-phosphorothioate
  modified_base 22: mod_base = OTHER; note = 2'-O-methylcytidine-3'-phosphorothioate
  modified_base 23: mod_base = OTHER; note = 2'-O-methyladenosine
tttgctaaaagagacattgcaca

SEQ ID NO: 1975 - RNA, 23 nt, synthetic construct
  source 1..23: mol_type = other RNA
  modified_base 1: mod_base = OTHER; note = 2'-O-methyluridine-3'-phosphorothioate 5'-(E)-Vinylphosphonate
  modified_base 2: mod_base = OTHER; note = 2'-deoxy-2'-fluorouridine-3'-phosphorothioate
  modified_base 3: mod_base = OTHER; note = 2'-O-methyladenosine-3'-phosphate
  modified_base 4: mod_base = OTHER; note = 2'-O-methylguanosine-3'-phosphate
  modified_base 5: mod_base = OTHER; note = 2'-O-methyladenosine-3'-phosphate
  modified_base 6: mod_base = OTHER; note = 2'-deoxy-2'-fluoroadenosine-3'-phosphate
  modified_base 7: mod_base = OTHER; note = 2'-O-methyladenosine-3'-phosphate
  modified_base 8: mod_base = OTHER; note = 2'-deoxy-2'-fluorocytidine-3'-phosphate
  modified_base 9: mod_base = OTHER; note = 2'-deoxy-2'-fluoroguanosine-3'-phosphate
  modified_base 10: mod_base = OTHER; note = 2'-O-methyluridine-3'-phosphate
  modified_base 11: mod_base = OTHER; note = 2'-O-methylguanosine-3'-phosphate
  modified_base 12: mod_base = OTHER; note = 2'-O-methyluridine-3'-phosphate
  modified_base 13: mod_base = OTHER; note = 2'-O-methyluridine-3'-phosphate
  modified_base 14: mod_base = OTHER; note = 2'-deoxy-2'-fluoroguanosine-3'-phosphate
  modified_base 15: mod_base = OTHER; note = 2'-O-methyluridine-3'-phosphate
  modified_base 16: mod_base = OTHER; note = 2'-deoxy-2'-fluorouridine-3'-phosphate
  modified_base 17: mod_base = OTHER; note = 2'-O-methyluridine-3'-phosphate
  modified_base 18: mod_base = OTHER; note = 2'-O-methylguanosine-3'-phosphate
  modified_base 19: mod_base = OTHER; note = 2'-O-methylguanosine-3'-phosphate
  modified_base 20: mod_base = OTHER; note = 2'-O-methyladenosine-3'-phosphate
  modified_base 21: mod_base = OTHER; note = 2'-O-methylguanosine-3'-phosphorothioate
  modified_base 22: mod_base = OTHER; note = 2'-O-methyladenosine-3'-phosphorothioate
  modified_base 23: mod_base = OTHER; note = 2'-O-methylcytidine
ttagaaacgtgttgtttggagac

SEQ ID NO: 1976 - RNA, 23 nt, synthetic construct
  source 1..23: mol_type = other RNA
  modified_base 1: mod_base = OTHER; note = 2'-O-methyluridine-3'-phosphorothioate 5'-(E)-Vinylphosphonate
  modified_base 2: mod_base = OTHER; note = 2'-deoxy-2'-fluorocytidine-3'-phosphorothioate
  modified_base 3: mod_base = OTHER; note = 2'-O-methyluridine-3'-phosphate
  modified_base 4: mod_base = OTHER; note = 2'-O-methyladenosine-3'-phosphate
  modified_base 5: mod_base = OTHER; note = 2'-O-methylguanosine-3'-phosphate
  modified_base 6: mod_base = OTHER; note = 2'-deoxy-2'-fluoroadenosine-3'-phosphate
  modified_base 7: mod_base = OTHER; note = 2'-O-methyladenosine-3'-phosphate
  modified_base 8: mod_base = OTHER; note = 2'-deoxy-2'-fluoroadenosine-3'-phosphate
  modified_base 9: mod_base = OTHER; note = 2'-deoxy-2'-fluorocytidine-3'-phosphate
  modified_base 10: mod_base = OTHER; note = 2'-O-methylguanosine-3'-phosphate
  modified_base 11: mod_base = OTHER; note = 2'-O-methyluridine-3'-phosphate
  modified_base 12: mod_base = OTHER; note = 2'-O-methylguanosine-3'-phosphate
  modified_base 13: mod_base = OTHER; note = 2'-O-methyluridine-3'-phosphate
  modified_base 14: mod_base = OTHER; note = 2'-deoxy-2'-fluorouridine-3'-phosphate
  modified_base 15: mod_base = OTHER; note = 2'-O-methylguanosine-3'-phosphate
  modified_base 16: mod_base = OTHER; note = 2'-deoxy-2'-fluorouridine-3'-phosphate
  modified_base 17: mod_base = OTHER; note = 2'-O-methyluridine-3'-phosphate
  modified_base 18: mod_base = OTHER; note = 2'-O-methyluridine-3'-phosphate
  modified_base 19: mod_base = OTHER; note = 2'-O-methylguanosine-3'-phosphate
  modified_base 20: mod_base = OTHER; note = 2'-O-methylguanosine-3'-phosphate
  modified_base 21: mod_base = OTHER; note = 2'-O-methyladenosine-3'-phosphorothioate
  modified_base 22: mod_base = OTHER; note = 2'-O-methylguanosine-3'-phosphorothioate
  modified_base 23: mod_base = OTHER; note = 2'-O-methyladenosine
tctagaaacgtgttgtttggaga

SEQ ID NO: 1977 - RNA, 23 nt, synthetic construct
  source 1..23: mol_type = other RNA
  modified_base 1: mod_base = OTHER; note = 2'-O-methyluridine-3'-phosphorothioate 5'-(E)-Vinylphosphonate
  modified_base 2: mod_base = OTHER; note = 2'-deoxy-2'-fluoroadenosine-3'-phosphorothioate
  modified_base 3: mod_base = OTHER; note = 2'-O-methyladenosine-3'-phosphate
  modified_base 4: mod_base = OTHER; note = 2'-O-methylcytidine-3'-phosphate
  modified_base 5: mod_base = OTHER; note = 2'-O-methyluridine-3'-phosphate
  modified_base 6: mod_base = OTHER; note = 2'-deoxy-2'-fluorouridine-3'-phosphate
  modified_base 7: mod_base = OTHER; note = 2'-O-methyluridine-3'-phosphate
  modified_base 8: mod_base = OTHER; note = 2'-deoxy-2'-fluoroadenosine-3'-phosphate
  modified_base 9: mod_base = OTHER; note = 2'-deoxy-2'-fluorocytidine-3'-phosphate
  modified_base 10: mod_base = OTHER; note = 2'-O-methyladenosine-3'-phosphate
  modified_base 11: mod_base = OTHER; note = 2'-O-methylguanosine-3'-phosphate
  modified_base 12: mod_base = OTHER; note = 2'-O-methyluridine-3'-phosphate
  modified_base 13: mod_base = OTHER; note = 2'-O-methyluridine-3'-phosphate
  modified_base 14: mod_base = OTHER; note = 2'-deoxy-2'-fluoroguanosine-3'-phosphate
  modified_base 15: mod_base = OTHER; note = 2'-O-methylguanosine-3'-phosphate
  modified_base 16: mod_base = OTHER; note = 2'-deoxy-2'-fluoroadenosine-3'-phosphate
  modified_base 17: mod_base = OTHER; note = 2'-O-methyluridine-3'-phosphate
  modified_base 18: mod_base = OTHER; note = 2'-O-methyluridine-3'-phosphate
  modified_base 19: mod_base = OTHER; note = 2'-O-methylcytidine-3'-phosphate
  modified_base 20: mod_base = OTHER; note = 2'-O-methyladenosine-3'-phosphate
  modified_base 21: mod_base = OTHER; note = 2'-O-methylcytidine-3'-phosphorothioate
  modified_base 22: mod_base = OTHER; note = 2'-O-methyladenosine-3'-phosphorothioate
  modified_base 23: mod_base = OTHER; note = 2'-O-methylguanosine
taactttacagttggattcacag

SEQ ID NO: 1978 - RNA, 23 nt, synthetic construct
  source 1..23: mol_type = other RNA
  modified_base 1: mod_base = OTHER; note = 2'-O-methyluridine-3'-phosphorothioate 5'-(E)-Vinylphosphonate
  modified_base 2: mod_base = OTHER; note = 2'-deoxy-2'-fluoroadenosine-3'-phosphorothioate
  modified_base 3: mod_base = OTHER; note = 2'-O-methyladenosine-3'-phosphate
  modified_base 4: mod_base = OTHER; note = 2'-O-methyladenosine-3'-phosphate
  modified_base 5: mod_base = OTHER; note = 2'-O-methylguanosine-3'-phosphate
  modified_base 6: mod_base = OTHER; note = 2'-deoxy-2'-fluoroadenosine-3'-phosphate
  modified_base 7: mod_base = OTHER; note = 2'-O-methyladenosine-3'-phosphate
  modified_base 8: mod_base = OTHER; note = 2'-deoxy-2'-fluorocytidine-3'-phosphate
  modified_base 9: mod_base = OTHER; note = 2'-deoxy-2'-fluorouridine-3'-phosphate
  modified_base 10: mod_base = OTHER; note = 2'-O-methyluridine-3'-phosphate
  modified_base 11: mod_base = OTHER; note = 2'-O-methyluridine-3'-phosphate
  modified_base 12: mod_base = OTHER; note = 2'-O-methyladenosine-3'-phosphate
  modified_base 13: mod_base = OTHER; note = 2'-O-methylcytidine-3'-phosphate
  modified_base 14: mod_base = OTHER; note = 2'-deoxy-2'-fluoroadenosine-3'-phosphate
  modified_base 15: mod_base = OTHER; note = 2'-O-methylguanosine-3'-phosphate
  modified_base 16: mod_base = OTHER; note = 2'-deoxy-2'-fluorouridine-3'-phosphate
  modified_base 17: mod_base = OTHER; note = 2'-O-methyluridine-3'-phosphate
  modified_base 18: mod_base = OTHER; note = 2'-O-methylguanosine-3'-phosphate
  modified_base 19: mod_base = OTHER; note = 2'-O-methylguanosine-3'-phosphate
  modified_base 20: mod_base = OTHER; note = 2'-O-methyladenosine-3'-phosphate
  modified_base 21: mod_base = OTHER; note = 2'-O-methyluridine-3'-phosphorothioate
  modified_base 22: mod_base = OTHER; note = 2'-O-methyluridine-3'-phosphorothioate
  modified_base 23: mod_base = OTHER; note = 2'-O-methylcytidine
taaagaactttacagttggattc

SEQ ID NO: 1979 - RNA, 23 nt, synthetic construct
  source 1..23: mol_type = other RNA
  modified_base 1: mod_base = OTHER; note = 2'-O-methyluridine-3'-phosphorothioate 5'-(E)-Vinylphosphonate
  modified_base 2: mod_base = OTHER; note = 2'-deoxy-2'-fluorouridine-3'-phosphorothioate
  modified_base 3: mod_base = OTHER; note = 2'-O-methyladenosine-3'-phosphate
  modified_base 4: mod_base = OTHER; note = 2'-O-methyladenosine-3'-phosphate
  modified_base 5: mod_base = OTHER; note = 2'-O-methyladenosine-3'-phosphate
  modified_base 6: mod_base = OTHER; note = 2'-deoxy-2'-fluoroguanosine-3'-phosphate
  modified_base 7: mod_base = OTHER; note = 2'-O-methyladenosine-3'-phosphate
  modified_base 8: mod_base = OTHER; note = 2'-deoxy-2'-fluoroadenosine-3'-phosphate
  modified_base 9: mod_base = OTHER; note = 2'-deoxy-2'-fluorocytidine-3'-phosphate
  modified_base 10: mod_base = OTHER; note = 2'-O-methyluridine-3'-phosphate
  modified_base 11: mod_base = OTHER; note = 2'-O-methyluridine-3'-phosphate
  modified_base 12: mod_base = OTHER; note = 2'-O-methyluridine-3'-phosphate
  modified_base 13: mod_base = OTHER; note = 2'-O-methyladenosine-3'-phosphate
  modified_base 14: mod_base = OTHER; note = 2'-deoxy-2'-fluorocytidine-3'-phosphate
  modified_base 15: mod_base = OTHER; note = 2'-O-methyladenosine-3'-phosphate
  modified_base 16: mod_base = OTHER; note = 2'-deoxy-2'-fluoroguanosine-3'-phosphate
  modified_base 17: mod_base = OTHER; note = 2'-O-methyluridine-3'-phosphate
  modified_base 18: mod_base = OTHER; note = 2'-O-methyluridine-3'-phosphate
  modified_base 19: mod_base = OTHER; note = 2'-O-methylguanosine-3'-phosphate
  modified_base 20: mod_base = OTHER; note = 2'-O-methylguanosine-3'-phosphate
  modified_base 21: mod_base = OTHER; note = 2'-O-methyladenosine-3'-phosphorothioate
  modified_base 22: mod_base = OTHER; note = 2'-O-methyluridine-3'-phosphorothioate
  modified_base 23: mod_base = OTHER; note = 2'-O-methyluridine
ttaaagaactttacagttggatt

SEQ ID NO: 1980 - RNA, 23 nt, synthetic construct
  source 1..23: mol_type = other RNA
  modified_base 1: mod_base = OTHER; note = 2'-O-methyluridine-3'-phosphorothioate 5'-(E)-Vinylphosphonate
  modified_base 2: mod_base = OTHER; note = 2'-deoxy-2'-fluoroadenosine-3'-phosphorothioate
  modified_base 3: mod_base = OTHER; note = 2'-O-methyluridine-3'-phosphate
  modified_base 4: mod_base = OTHER; note = 2'-O-methyladenosine-3'-phosphate
  modified_base 5: mod_base = OTHER; note = 2'-O-methyladenosine-3'-phosphate
  modified_base 6: mod_base = OTHER; note = 2'-deoxy-2'-fluoroadenosine-3'-phosphate
  modified_base 7: mod_base = OTHER; note = 2'-O-methylguanosine-3'-phosphate
  modified_base 8: mod_base = OTHER; note = 2'-deoxy-2'-fluoroadenosine-3'-phosphate
  modified_base 9: mod_base = OTHER; note = 2'-deoxy-2'-fluoroadenosine-3'-phosphate
  modified_base 10: mod_base = OTHER; note = 2'-O-methylcytidine-3'-phosphate
  modified_base 11: mod_base = OTHER; note = 2'-O-methyluridine-3'-phosphate
  modified_base 12: mod_base = OTHER; note = 2'-O-methyluridine-3'-phosphate
  modified_base 13: mod_base = OTHER; note = 2'-O-methyluridine-3'-phosphate
  modified_base 14: mod_base = OTHER; note = 2'-deoxy-2'-fluoroadenosine-3'-phosphate
  modified_base 15: mod_base = OTHER; note = 2'-O-methylcytidine-3'-phosphate
  modified_base 16: mod_base = OTHER; note = 2'-deoxy-2'-fluoroadenosine-3'-phosphate
  modified_base 17: mod_base = OTHER; note = 2'-O-methylguanosine-3'-phosphate
  modified_base 18: mod_base = OTHER; note = 2'-O-methyluridine-3'-phosphate
  modified_base 19: mod_base = OTHER; note = 2'-O-methyluridine-3'-phosphate
  modified_base 20: mod_base = OTHER; note = 2'-O-methylguanosine-3'-phosphate
  modified_base 21: mod_base = OTHER; note = 2'-O-methylguanosine-3'-phosphorothioate
  modified_base 22: mod_base = OTHER; note = 2'-O-methyladenosine-3'-phosphorothioate
  modified_base 23: mod_base = OTHER; note = 2'-O-methyluridine
tataaagaactttacagttggat

SEQ ID NO: 1981 - RNA, 23 nt, synthetic construct
  source 1..23: mol_type = other RNA
  modified_base 1: mod_base = OTHER; note = 2'-O-methyluridine-3'-phosphorothioate 5'-(E)-Vinylphosphonate
  modified_base 2: mod_base = OTHER; note = 2'-deoxy-2'-fluoroadenosine-3'-phosphorothioate
  modified_base 3: mod_base = OTHER; note = 2'-O-methyladenosine-3'-phosphate
  modified_base 4: mod_base = OTHER; note = 2'-O-methyluridine-3'-phosphate
  modified_base 5: mod_base = OTHER; note = 2'-O-methyladenosine-3'-phosphate
  modified_base 6: mod_base = OTHER; note = 2'-deoxy-2'-fluoroadenosine-3'-phosphate
  modified_base 7: mod_base = OTHER; note = 2'-O-methyladenosine-3'-phosphate
  modified_base 8: mod_base = OTHER; note = 2'-deoxy-2'-fluoroguanosine-3'-phosphate
  modified_base 9: mod_base = OTHER; note = 2'-deoxy-2'-fluoroadenosine-3'-phosphate
  modified_base 10: mod_base = OTHER; note = 2'-O-methyladenosine-3'-phosphate
  modified_base 11: mod_base = OTHER; note = 2'-O-methylcytidine-3'-phosphate
  modified_base 12: mod_base = OTHER; note = 2'-O-methyluridine-3'-phosphate
  modified_base 13: mod_base = OTHER; note = 2'-O-methyluridine-3'-phosphate
  modified_base 14: mod_base = OTHER; note = 2'-deoxy-2'-fluorouridine-3'-phosphate
  modified_base 15: mod_base = OTHER; note = 2'-O-methyladenosine-3'-phosphate
  modified_base 16: mod_base = OTHER; note = 2'-deoxy-2'-fluorocytidine-3'-phosphate
  modified_base 17: mod_base = OTHER; note = 2'-O-methyladenosine-3'-phosphate
  modified_base 18: mod_base = OTHER; note = 2'-O-methylguanosine-3'-phosphate
  modified_base 19: mod_base = OTHER; note = 2'-O-methyluridine-3'-phosphate
  modified_base 20: mod_base = OTHER; note = 2'-O-methyluridine-3'-phosphate
  modified_base 21: mod_base = OTHER; note = 2'-O-methylguanosine-3'-phosphorothioate
  modified_base 22: mod_base = OTHER; note = 2'-O-methylguanosine-3'-phosphorothioate
  modified_base 23: mod_base = OTHER; note = 2'-O-methyladenosine
taataaagaactttacagttgga

SEQ ID NO: 1982 - RNA, 23 nt, synthetic construct
  source 1..23: mol_type = other RNA
  modified_base 1: mod_base = OTHER; note = 2'-O-methyluridine-3'-phosphorothioate 5'-(E)-Vinylphosphonate
  modified_base 2: mod_base = OTHER; note = 2'-deoxy-2'-fluorocytidine-3'-phosphorothioate
  modified_base 3: mod_base = OTHER; note = 2'-O-methyladenosine-3'-phosphate
  modified_base 4: mod_base = OTHER; note = 2'-O-methyladenosine-3'-phosphate
  modified_base 5: mod_base = OTHER; note = 2'-O-methyluridine-3'-phosphate
  modified_base 6: mod_base = OTHER; note = 2'-deoxy-2'-fluoroadenosine-3'-phosphate
  modified_base 7: mod_base = OTHER; note = 2'-O-methyladenosine-3'-phosphate
  modified_base 8: mod_base = OTHER; note = 2'-deoxy-2'-fluoroadenosine-3'-phosphate
  modified_base 9: mod_base = OTHER; note = 2'-deoxy-2'-fluoroguanosine-3'-phosphate
  modified_base 10: mod_base = OTHER; note = 2'-O-methyladenosine-3'-phosphate
  modified_base 11: mod_base = OTHER; note = 2'-O-methyladenosine-3'-phosphate
  modified_base 12: mod_base = OTHER; note = 2'-O-methylcytidine-3'-phosphate
  modified_base 13: mod_base = OTHER; note = 2'-O-methyluridine-3'-phosphate
  modified_base 14: mod_base = OTHER; note = 2'-deoxy-2'-fluorouridine-3'-phosphate
  modified_base 15: mod_base = OTHER; note = 2'-O-methyluridine-3'-phosphate
  modified_base 16: mod_base = OTHER; note = 2'-deoxy-2'-fluoroadenosine-3'-phosphate
  modified_base 17: mod_base = OTHER; note = 2'-O-methylcytidine-3'-phosphate
  modified_base 18: mod_base = OTHER; note = 2'-O-methyladenosine-3'-phosphate
  modified_base 19: mod_base = OTHER; note = 2'-O-methylguanosine-3'-phosphate
  modified_base 20: mod_base = OTHER; note = 2'-O-methyluridine-3'-phosphate
  modified_base 21: mod_base = OTHER; note = 2'-O-methyluridine-3'-phosphorothioate
  modified_base 22: mod_base = OTHER; note = 2'-O-methylguanosine-3'-phosphorothioate
  modified_base 23: mod_base = OTHER; note = 2'-O-methylguanosine
tcaataaagaactttacagttgg

SEQ ID NO: 1983 - RNA, 23 nt, synthetic construct
  source 1..23: mol_type = other RNA
  modified_base 1: mod_base = OTHER; note = 2'-O-methyluridine-3'-phosphorothioate 5'-(E)-Vinylphosphonate
  modified_base 2: mod_base = OTHER; note = 2'-deoxy-2'-fluorouridine-3'-phosphorothioate
  modified_base 3: mod_base = OTHER; note = 2'-O-methyluridine-3'-phosphate
  modified_base 4: mod_base = OTHER; note = 2'-O-methyluridine-3'-phosphate
  modified_base 5: mod_base = OTHER; note = 2'-O-methyladenosine-3'-phosphate
  modified_base 6: mod_base = OTHER; note = 2'-deoxy-2'-fluorouridine-3'-phosphate
  modified_base 7: mod_base = OTHER; note = 2'-O-methyladenosine-3'-phosphate
  modified_base 8: mod_base = OTHER; note = 2'-deoxy-2'-fluoroguanosine-3'-phosphate
  modified_base 9: mod_base = OTHER; note = 2'-deoxy-2'-fluoroadenosine-3'-phosphate
  modified_base 10: mod_base = OTHER; note = 2'-O-methylguanosine-3'-phosphate
  modified_base 11: mod_base = OTHER; note = 2'-O-methyladenosine-3'-phosphate
  modified_base 12: mod_base = OTHER; note = 2'-O-methyluridine-3'-phosphate
  modified_base 13: mod_base = OTHER; note = 2'-O-methyluridine-3'-phosphate
  modified_base 14: mod_base = OTHER; note = 2'-deoxy-2'-fluorouridine-3'-phosphate
  modified_base 15: mod_base = OTHER; note = 2'-O-methylcytidine-3'-phosphate
  modified_base 16: mod_base = OTHER; note = 2'-deoxy-2'-fluorouridine-3'-phosphate
  modified_base 17: mod_base = OTHER; note = 2'-O-methyluridine-3'-phosphate
  modified_base 18: mod_base = OTHER; note = 2'-O-methylcytidine-3'-phosphate
  modified_base 19: mod_base = OTHER; note = 2'-O-methylcytidine-3'-phosphate
  modified_base 20: mod_base = OTHER; note = 2'-O-methyluridine-3'-phosphate
  modified_base 21: mod_base = OTHER; note = 2'-O-methylcytidine-3'-phosphorothioate
  modified_base 22: mod_base = OTHER; note = 2'-O-methylcytidine-3'-phosphorothioate
  modified_base 23: mod_base = OTHER; note = 2'-O-methyluridine
ttttatagagatttcttcctcct

SEQ ID NO: 1984 - RNA, 23 nt, synthetic construct
  source 1..23: mol_type = other RNA
  modified_base 1: mod_base = OTHER; note = 2'-O-methyluridine-3'-phosphorothioate 5'-(E)-Vinylphosphonate
  modified_base 2: mod_base = OTHER; note = 2'-deoxy-2'-fluorocytidine-3'-phosphorothioate
  modified_base 3: mod_base = OTHER; note = 2'-O-methyladenosine-3'-phosphate
  modified_base 4: mod_base = OTHER; note = 2'-O-methyladenosine-3'-phosphate
  modified_base 5: mod_base = OTHER; note = 2'-O-methyluridine-3'-phosphate
  modified_base 6: mod_base = OTHER; note = 2'-deoxy-2'-fluorouridine-3'-phosphate
  modified_base 7: mod_base = OTHER; note = 2'-O-methyluridine-3'-phosphate
  modified_base 8: mod_base = OTHER; note = 2'-deoxy-2'-fluoroguanosine-3'-phosphate
  modified_base 9: mod_base = OTHER; note = 2'-deoxy-2'-fluoroadenosine-3'-phosphate
  modified_base 10: mod_base = OTHER; note = 2'-O-methyluridine-3'-phosphate
  modified_base 11: mod_base = OTHER; note = 2'-O-methylcytidine-3'-phosphate
  modified_base 12: mod_base = OTHER; note = 2'-O-methyluridine-3'-phosphate
  modified_base 13: mod_base = OTHER; note = 2'-O-methyluridine-3'-phosphate
  modified_base 14: mod_base = OTHER; note = 2'-deoxy-2'-fluorocytidine-3'-phosphate
  modified_base 15: mod_base = OTHER; note = 2'-O-methyladenosine-3'-phosphate
  modified_base 16: mod_base = OTHER; note = 2'-deoxy-2'-fluoroadenosine-3'-phosphate
  modified_base 17: mod_base = OTHER; note = 2'-O-methylcytidine-3'-phosphate
  modified_base 18: mod_base = OTHER; note = 2'-O-methyluridine-3'-phosphate
  modified_base 19: mod_base = OTHER; note = 2'-O-methyluridine-3'-phosphate
  modified_base 20: mod_base = OTHER; note = 2'-O-methylcytidine-3'-phosphate
  modified_base 21: mod_base = OTHER; note = 2'-O-methylcytidine-3'-phosphorothioate
  modified_base 22: mod_base = OTHER; note = 2'-O-methyladenosine-3'-phosphorothioate
  modified_base 23: mod_base = OTHER; note = 2'-O-methylguanosine
tcaatttgatcttcaacttccag

SEQ ID NO: 1985 - RNA, 23 nt, synthetic construct
  source 1..23: mol_type = other RNA
  modified_base 1: mod_base = OTHER; note = 2'-O-methyluridine-3'-phosphorothioate 5'-(E)-Vinylphosphonate
  modified_base 2: mod_base = OTHER; note = 2'-deoxy-2'-fluorouridine-3'-phosphorothioate
  modified_base 3: mod_base = OTHER; note = 2'-O-methylcytidine-3'-phosphate
  modified_base 4: mod_base = OTHER; note = 2'-O-methyladenosine-3'-phosphate
  modified_base 5: mod_base = OTHER; note = 2'-O-methyladenosine-3'-phosphate
  modified_base 6: mod_base = OTHER; note = 2'-deoxy-2'-fluorouridine-3'-phosphate
  modified_base 7: mod_base = OTHER; note = 2'-O-methyluridine-3'-phosphate
  modified_base 8: mod_base = OTHER; note = 2'-deoxy-2'-fluorouridine-3'-phosphate
  modified_base 9: mod_base = OTHER; note = 2'-deoxy-2'-fluoroguanosine-3'-phosphate
  modified_base 10: mod_base = OTHER; note = 2'-O-methyladenosine-3'-phosphate
  modified_base 11: mod_base = OTHER; note = 2'-O-methyluridine-3'-phosphate
  modified_base 12: mod_base = OTHER; note = 2'-O-methylcytidine-3'-phosphate
  modified_base 13: mod_base = OTHER; note = 2'-O-methyluridine-3'-phosphate
  modified_base 14: mod_base = OTHER; note = 2'-deoxy-2'-fluorouridine-3'-phosphate
  modified_base 15: mod_base = OTHER; note = 2'-O-methylcytidine-3'-phosphate
  modified_base 16: mod_base = OTHER; note = 2'-deoxy-2'-fluoroadenosine-3'-phosphate
  modified_base 17: mod_base = OTHER; note = 2'-O-methyladenosine-3'-phosphate
  modified_base 18: mod_base = OTHER; note = 2'-O-methylcytidine-3'-phosphate
  modified_base 19: mod_base = OTHER; note = 2'-O-methyluridine-3'-phosphate
  modified_base 20: mod_base = OTHER; note = 2'-O-methyluridine-3'-phosphate
  modified_base 21: mod_base = OTHER; note = 2'-O-methylcytidine-3'-phosphorothioate
  modified_base 22: mod_base = OTHER; note = 2'-O-methylcytidine-3'-phosphorothioate
  modified_base 23: mod_base = OTHER; note = 2'-O-methyladenosine
ttcaatttgatcttcaacttcca

SEQ ID NO: 1986 - RNA, 23 nt, synthetic construct
  source 1..23: mol_type = other RNA
  modified_base 1: mod_base = OTHER; note = 2'-O-methyluridine-3'-phosphorothioate 5'-(E)-Vinylphosphonate
  modified_base 2: mod_base = OTHER; note = 2'-deoxy-2'-fluorouridine-3'-phosphorothioate
  modified_base 3: mod_base = OTHER; note = 2'-O-methyluridine-3'-phosphate
  modified_base 4: mod_base = OTHER; note = 2'-O-methylcytidine-3'-phosphate
  modified_base 5: mod_base = OTHER; note = 2'-O-methyladenosine-3'-phosphate
  modified_base 6: mod_base = OTHER; note = 2'-deoxy-2'-fluoroadenosine-3'-phosphate
  modified_base 7: mod_base = OTHER; note = 2'-O-methyluridine-3'-phosphate
  modified_base 8: mod_base = OTHER; note = 2'-deoxy-2'-fluorouridine-3'-phosphate
  modified_base 9: mod_base = OTHER; note = 2'-deoxy-2'-fluorouridine-3'-phosphate
  modified_base 10: mod_base = OTHER; note = 2'-O-methylguanosine-3'-phosphate
  modified_base 11: mod_base = OTHER; note = 2'-O-methyladenosine-3'-phosphate
  modified_base 12: mod_base = OTHER; note = 2'-O-methyluridine-3'-phosphate
  modified_base 13: mod_base = OTHER; note = 2'-O-methylcytidine-3'-phosphate
  modified_base 14: mod_base = OTHER; note = 2'-deoxy-2'-fluorouridine-3'-phosphate
  modified_base 15: mod_base = OTHER; note = 2'-O-methyluridine-3'-phosphate
  modified_base 16: mod_base = OTHER; note = 2'-deoxy-2'-fluorocytidine-3'-phosphate
  modified_base 17: mod_base = OTHER; note = 2'-O-methyladenosine-3'-phosphate
  modified_base 18: mod_base = OTHER; note = 2'-O-methyladenosine-3'-phosphate
  modified_base 19: mod_base = OTHER; note = 2'-O-methylcytidine-3'-phosphate
  modified_base 20: mod_base = OTHER; note = 2'-O-methyluridine-3'-phosphate
  modified_base 21: mod_base = OTHER; note = 2'-O-methyluridine-3'-phosphorothioate
  modified_base 22: mod_base = OTHER; note = 2'-O-methylcytidine-3'-phosphorothioate
  modified_base 23: mod_base = OTHER; note = 2'-O-methylcytidine
tttcaatttgatcttcaacttcc

SEQ ID NO: 1987 - RNA, 23 nt, synthetic construct
  source 1..23: mol_type = other RNA
  modified_base 1: mod_base = OTHER; note = 2'-O-methyluridine-3'-phosphorothioate 5'-(E)-Vinylphosphonate
  modified_base 2: mod_base = OTHER; note = 2'-deoxy-2'-fluoroadenosine-3'-phosphorothioate
  modified_base 3: mod_base = OTHER; note = 2'-O-methyluridine-3'-phosphate
  modified_base 4: mod_base = OTHER; note = 2'-O-methylguanosine-3'-phosphate
  modified_base 5: mod_base = OTHER; note = 2'-O-methyladenosine-3'-phosphate
  modified_base 6: mod_base = OTHER; note = 2'-deoxy-2'-fluoroguanosine-3'-phosphate
  modified_base 7: mod_base = OTHER; note = 2'-O-methyladenosine-3'-phosphate
  modified_base 8: mod_base = OTHER; note = 2'-deoxy-2'-fluoroadenosine-3'-phosphate
  modified_base 9: mod_base = OTHER; note = 2'-deoxy-2'-fluorocytidine-3'-phosphate
  modified_base 10: mod_base = OTHER; note = 2'-O-methyladenosine-3'-phosphate
  modified_base 11: mod_base = OTHER; note = 2'-O-methyladenosine-3'-phosphate
  modified_base 12: mod_base = OTHER; note = 2'-O-methyladenosine-3'-phosphate
  modified_base 13: mod_base = OTHER; note = 2'-O-methyluridine-3'-phosphate
  modified_base 14: mod_base = OTHER; note = 2'-deoxy-2'-fluoroguanosine-3'-phosphate
  modified_base 15: mod_base = OTHER; note = 2'-O-methyluridine-3'-phosphate
  modified_base 16: mod_base = OTHER; note = 2'-deoxy-2'-fluoroguanosine-3'-phosphate
  modified_base 17: mod_base = OTHER; note = 2'-O-methylguanosine-3'-phosphate
  modified_base 18: mod_base = OTHER; note = 2'-O-methyluridine-3'-phosphate
  modified_base 19: mod_base = OTHER; note = 2'-O-methylcytidine-3'-phosphate
  modified_base 20: mod_base = OTHER; note = 2'-O-methyluridine-3'-phosphate
  modified_base 21: mod_base = OTHER; note = 2'-O-methyluridine-3'-phosphorothioate
  modified_base 22: mod_base = OTHER; note = 2'-O-methyladenosine-3'-phosphorothioate
  modified_base 23: mod_base = OTHER; note = 2'-O-methyladenosine
tatgagaacaaatgtggtcttaa

SEQ ID NO: 1988 - RNA, 23 nt, synthetic construct
  source 1..23: mol_type = other RNA
  modified_base 1: mod_base = OTHER; note = 2'-O-methyluridine-3'-phosphorothioate 5'-(E)-Vinylphosphonate
  modified_base 2: mod_base = OTHER; note = 2'-deoxy-2'-fluorocytidine-3'-phosphorothioate
  modified_base 3: mod_base = OTHER; note = 2'-O-methyluridine-3'-phosphate
  modified_base 4: mod_base = OTHER; note = 2'-O-methyluridine-3'-phosphate
  modified_base 5: mod_base = OTHER; note = 2'-O-methyluridine-3'-phosphate
  modified_base 6: mod_base = OTHER; note = 2'-deoxy-2'-fluorouridine-3'-phosphate
  modified_base 7: mod_base = OTHER; note = 2'-O-methylguanosine-3'-phosphate
  modified_base 8: mod_base = OTHER; note = 2'-deoxy-2'-fluoroadenosine-3'-phosphate
  modified_base 9: mod_base = OTHER; note = 2'-deoxy-2'-fluoroguanosine-3'-phosphate
  modified_base 10: mod_base = OTHER; note = 2'-O-methyladenosine-3'-phosphate
  modified_base 11: mod_base = OTHER; note = 2'-O-methyluridine-3'-phosphate
  modified_base 12: mod_base = OTHER; note = 2'-O-methyladenosine-3'-phosphate
  modified_base 13: mod_base = OTHER; note = 2'-O-methyladenosine-3'-phosphate
  modified_base 14: mod_base = OTHER; note = 2'-deoxy-2'-fluorouridine-3'-phosphate
  modified_base 15: mod_base = OTHER; note = 2'-O-methylguanosine-3'-phosphate
  modified_base 16: mod_base = OTHER; note = 2'-deoxy-2'-fluoroadenosine-3'-phosphate
  modified_base 17: mod_base = OTHER; note = 2'-O-methylguanosine-3'-phosphate
  modified_base 18: mod_base = OTHER; note = 2'-O-methyladenosine-3'-phosphate
  modified_base 19: mod_base = OTHER; note = 2'-O-methyladenosine-3'-phosphate
  modified_base 20: mod_base = OTHER; note = 2'-O-methylcytidine-3'-phosphate
  modified_base 21: mod_base = OTHER; note = 2'-O-methyladenosine-3'-phosphorothioate
  modified_base 22: mod_base = OTHER; note = 2'-O-methyladenosine-3'-phosphorothioate
  modified_base 23: mod_base = OTHER; note = 2'-O-methyladenosine
tcttttgagataatgagaacaaa

SEQ ID NO: 1989 - RNA, 23 nt, synthetic construct
  source 1..23: mol_type = other RNA
  modified_base 1: mod_base = OTHER; note = 2'-O-methyluridine-3'-phosphorothioate 5'-(E)-Vinylphosphonate
  modified_base 2: mod_base = OTHER; note = 2'-deoxy-2'-fluoroadenosine-3'-phosphorothioate
  modified_base 3: mod_base = OTHER; note = 2'-O-methylcytidine-3'-phosphate
  modified_base 4: mod_base = OTHER; note = 2'-O-methyluridine-3'-phosphate
  modified_base 5: mod_base = OTHER; note = 2'-O-methyluridine-3'-phosphate
  modified_base 6: mod_base = OTHER; note = 2'-deoxy-2'-fluorouridine-3'-phosphate
  modified_base 7: mod_base = OTHER; note = 2'-O-methyluridine-3'-phosphate
  modified_base 8: mod_base = OTHER; note = 2'-deoxy-2'-fluoroguanosine-3'-phosphate
  modified_base 9: mod_base = OTHER; note = 2'-deoxy-2'-fluoroadenosine-3'-phosphate
  modified_base 10: mod_base = OTHER; note = 2'-O-methylguanosine-3'-phosphate
  modified_base 11: mod_base = OTHER; note = 2'-O-methyladenosine-3'-phosphate
  modified_base 12: mod_base = OTHER; note = 2'-O-methyluridine-3'-phosphate
  modified_base 13: mod_base = OTHER; note = 2'-O-methyladenosine-3'-phosphate
  modified_base 14: mod_base = OTHER; note = 2'-deoxy-2'-fluoroadenosine-3'-phosphate
  modified_base 15: mod_base = OTHER; note = 2'-O-methyluridine-3'-phosphate
  modified_base 16: mod_base = OTHER; note = 2'-deoxy-2'-fluoroguanosine-3'-phosphate
  modified_base 17: mod_base = OTHER; note = 2'-O-methyladenosine-3'-phosphate
  modified_base 18: mod_base = OTHER; note = 2'-O-methylguanosine-3'-phosphate
  modified_base 19: mod_base = OTHER; note = 2'-O-methyladenosine-3'-phosphate
  modified_base 20: mod_base = OTHER; note = 2'-O-methyladenosine-3'-phosphate
  modified_base 21: mod_base = OTHER; note = 2'-O-methylcytidine-3'-phosphorothioate
  modified_base 22: mod_base = OTHER; note = 2'-O-methyladenosine-3'-phosphorothioate
  modified_base 23: mod_base = OTHER; note = 2'-O-methyladenosine
tacttttgagataatgagaacaa

SEQ ID NO: 1990 - RNA, 23 nt, synthetic construct
  source 1..23: mol_type = other RNA
  modified_base 1: mod_base = OTHER; note = 2'-O-methyluridine-3'-phosphorothioate 5'-(E)-Vinylphosphonate
  modified_base 2: mod_base = OTHER; note = 2'-deoxy-2'-fluorocytidine-3'-phosphorothioate
  modified_base 3: mod_base = OTHER; note = 2'-O-methyladenosine-3'-phosphate
  modified_base 4: mod_base = OTHER; note = 2'-O-methylcytidine-3'-phosphate
  modified_base 5: mod_base = OTHER; note = 2'-O-methyluridine-3'-phosphate
  modified_base 6: mod_base = OTHER; note = 2'-deoxy-2'-fluorouridine-3'-phosphate
  modified_base 7: mod_base = OTHER; note = 2'-O-methyluridine-3'-phosphate
  modified_base 8: mod_base = OTHER; note = 2'-deoxy-2'-fluorouridine-3'-phosphate
  modified_base 9: mod_base = OTHER; note = 2'-deoxy-2'-fluoroguanosine-3'-phosphate
  modified_base 10: mod_base = OTHER; note = 2'-O-methyladenosine-3'-phosphate
  modified_base 11: mod_base = OTHER; note = 2'-O-methylguanosine-3'-phosphate
  modified_base 12: mod_base = OTHER; note = 2'-O-methyladenosine-3'-phosphate
  modified_base 13: mod_base = OTHER; note = 2'-O-methyluridine-3'-phosphate
  modified_base 14: mod_base = OTHER; note = 2'-deoxy-2'-fluoroadenosine-3'-phosphate
  modified_base 15: mod_base = OTHER; note = 2'-O-methyladenosine-3'-phosphate
  modified_base 16: mod_base = OTHER; note = 2'-deoxy-2'-fluorouridine-3'-phosphate
  modified_base 17: mod_base = OTHER; note = 2'-O-methylguanosine-3'-phosphate
  modified_base 18: mod_base = OTHER; note = 2'-O-methyladenosine-3'-phosphate
  modified_base 19: mod_base = OTHER; note = 2'-O-methylguanosine-3'-phosphate
  modified_base 20: mod_base = OTHER; note = 2'-O-methyladenosine-3'-phosphate
  modified_base 21: mod_base = OTHER; note = 2'-O-methyladenosine-3'-phosphorothioate
  modified_base 22: mod_base = OTHER; note = 2'-O-methylcytidine-3'-phosphorothioate
  modified_base 23: mod_base = OTHER; note = 2'-O-methyladenosine
tcacttttgagataatgagaaca

SEQ ID NO: 1991 - RNA, 23 nt, synthetic construct
  source 1..23: mol_type = other RNA
  modified_base 1: mod_base = OTHER; note = 2'-O-methyluridine-3'-phosphorothioate 5'-(E)-Vinylphosphonate
  modified_base 2: mod_base = OTHER; note = 2'-deoxy-2'-fluorouridine-3'-phosphorothioate
  modified_base 3: mod_base = OTHER; note = 2'-O-methylguanosine-3'-phosphate
  modified_base 4: mod_base = OTHER; note = 2'-O-methyluridine-3'-phosphate
  modified_base 5: mod_base = OTHER; note = 2'-O-methyladenosine-3'-phosphate
  modified_base 6: mod_base = OTHER; note = 2'-deoxy-2'-fluoroadenosine-3'-phosphate
  modified_base 7: mod_base = OTHER; note = 2'-O-methyladenosine-3'-phosphate
  modified_base 8: mod_base = OTHER; note = 2'-deoxy-2'-fluoroadenosine-3'-phosphate
  modified_base 9: mod_base = OTHER; note = 2'-deoxy-2'-fluorocytidine-3'-phosphate
  modified_base 10: mod_base = OTHER; note = 2'-O-methyluridine-3'-phosphate
  modified_base 11: mod_base = OTHER; note = 2'-O-methylguanosine-3'-phosphate
  modified_base 12: mod_base = OTHER; note = 2'-O-methylguanosine-3'-phosphate
  modified_base 13: mod_base = OTHER; note = 2'-O-methyladenosine-3'-phosphate
  modified_base 14: mod_base = OTHER; note = 2'-deoxy-2'-fluoroguanosine-3'-phosphate
  modified_base 15: mod_base = OTHER; note = 2'-O-methyladenosine-3'-phosphate
  modified_base 16: mod_base = OTHER; note = 2'-deoxy-2'-fluoroadenosine-3'-phosphate
  modified_base 17: mod_base = OTHER; note = 2'-O-methyladenosine-3'-phosphate
  modified_base 18: mod_base = OTHER; note = 2'-O-methylguanosine-3'-phosphate
  modified_base 19: mod_base = OTHER; note = 2'-O-methylcytidine-3'-phosphate
  modified_base 20: mod_base = OTHER; note = 2'-O-methyladenosine-3'-phosphate
  modified_base 21: mod_base = OTHER; note = 2'-O-methylguanosine-3'-phosphorothioate
  modified_base 22: mod_base = OTHER; note = 2'-O-methylcytidine-3'-phosphorothioate
  modified_base 23: mod_base = OTHER; note = 2'-O-methylcytidine
ttgtaaaactggagaaagcagcc

SEQ ID NO: 1992 - RNA, 23 nt, synthetic construct
  source 1..23: mol_type = other RNA
  modified_base 1: mod_base = OTHER; note = 2'-O-methyluridine-3'-phosphorothioate 5'-(E)-Vinylphosphonate
  modified_base 2: mod_base = OTHER; note = 2'-deoxy-2'-fluoroguanosine-3'-phosphorothioate
  modified_base 3: mod_base = OTHER; note = 2'-O-methyladenosine-3'-phosphate
  modified_base 4: mod_base = OTHER; note = 2'-O-methyladenosine-3'-phosphate
  modified_base 5: mod_base = OTHER; note = 2'-O-methyladenosine-3'-phosphate
  modified_base 6: mod_base = OTHER; note = 2'-deoxy-2'-fluoroadenosine-3'-phosphate
  modified_base 7: mod_base = OTHER; note = 2'-O-methyluridine-3'-phosphate
  modified_base 8: mod_base = OTHER; note = 2'-deoxy-2'-fluorocytidine-3'-phosphate
  modified_base 9: mod_base = OTHER; note = 2'-deoxy-2'-fluorocytidine-3'-phosphate
  modified_base 10: mod_base = OTHER; note = 2'-O-methyladenosine-3'-phosphate
  modified_base 11: mod_base = OTHER; note = 2'-O-methyladenosine-3'-phosphate
  modified_base 12: mod_base = OTHER; note = 2'-O-methyladenosine-3'-phosphate
  modified_base 13: mod_base = OTHER; note = 2'-O-methyluridine-3'-phosphate
  modified_base 14: mod_base = OTHER; note = 2'-deoxy-2'-fluorouridine-3'-phosphate
  modified_base 15: mod_base = OTHER; note = 2'-O-methylguanosine-3'-phosphate
  modified_base 16: mod_base = OTHER; note = 2'-deoxy-2'-fluorocytidine-3'-phosphate
  modified_base 17: mod_base = OTHER; note = 2'-O-methyluridine-3'-phosphate
  modified_base 18: mod_base = OTHER; note = 2'-O-methylcytidine-3'-phosphate
  modified_base 19: mod_base = OTHER; note = 2'-O-methyluridine-3'-phosphate
  modified_base 20: mod_base = OTHER; note = 2'-O-methyladenosine-3'-phosphate
  modified_base 21: mod_base = OTHER; note = 2'-O-methyladenosine-3'-phosphorothioate
  modified_base 22: mod_base = OTHER; note = 2'-O-methylguanosine-3'-phosphorothioate
  modified_base 23: mod_base = OTHER; note = 2'-O-methylguanosine
tgaaaatccaaattgctctaagg

SEQ ID NO: 1993 - RNA, 23 nt, synthetic construct
  source 1..23: mol_type = other RNA
  modified_base 1: mod_base = OTHER; note = 2'-O-methyluridine-3'-phosphorothioate 5'-(E)-Vinylphosphonate
  modified_base 2: mod_base = OTHER; note = 2'-deoxy-2'-fluorouridine-3'-phosphorothioate
  modified_base 3: mod_base = OTHER; note = 2'-O-methyluridine-3'-phosphate
  modified_base 4: mod_base = OTHER; note = 2'-O-methylguanosine-3'-phosphate
  modified_base 5: mod_base = OTHER; note = 2'-O-methyladenosine-3'-phosphate
  modified_base 6: mod_base = OTHER; note = 2'-deoxy-2'-fluoroadenosine-3'-phosphate
  modified_base 7: mod_base = OTHER; note = 2'-O-methyluridine-3'-phosphate
  modified_base 8: mod_base = OTHER; note = 2'-deoxy-2'-fluoroadenosine-3'-phosphate
  modified_base 9: mod_base = OTHER; note = 2'-deoxy-2'-fluoroguanosine-3'-phosphate
  modified_base 10: mod_base = OTHER; note = 2'-O-methyluridine-3'-phosphate
  modified_base 11: mod_base = OTHER; note = 2'-O-methylcytidine-3'-phosphate
  modified_base 12: mod_base = OTHER; note = 2'-O-methyluridine-3'-phosphate
  modified_base 13: mod_base = OTHER; note = 2'-O-methyluridine-3'-phosphate
  modified_base 14: mod_base = OTHER; note = 2'-deoxy-2'-fluorouridine-3'-phosphate
  modified_base 15: mod_base = OTHER; note = 2'-O-methylcytidine-3'-phosphate
  modified_base 16: mod_base = OTHER; note = 2'-deoxy-2'-fluorouridine-3'-phosphate
  modified_base 17: mod_base = OTHER; note = 2'-O-methylcytidine-3'-phosphate
  modified_base 18: mod_base = OTHER; note = 2'-O-methyladenosine-3'-phosphate
  modified_base 19: mod_base = OTHER; note = 2'-O-methylguanosine-3'-phosphate
  modified_base 20: mod_base = OTHER; note = 2'-O-methyladenosine-3'-phosphate
  modified_base 21: mod_base = OTHER; note = 2'-O-methyladenosine-3'-phosphorothioate
  modified_base 22: mod_base = OTHER; note = 2'-O-methyladenosine-3'-phosphorothioate
  modified_base 23: mod_base = OTHER; note = 2'-O-methyladenosine
tttgaatagtctttctcagaaaa

SEQ ID NO: 1994 - RNA, 23 nt, synthetic construct
  source 1..23: mol_type = other RNA
  modified_base 1: mod_base = OTHER; note = 2'-O-methyluridine-3'-phosphorothioate 5'-(E)-Vinylphosphonate
  modified_base 2: mod_base = OTHER; note = 2'-deoxy-2'-fluoroadenosine-3'-phosphorothioate
  modified_base 3: mod_base = OTHER; note = 2'-O-methyladenosine-3'-phosphate
  modified_base 4: mod_base = OTHER; note = 2'-O-methylguanosine-3'-phosphate
  modified_base 5: mod_base = OTHER; note = 2'-O-methyluridine-3'-phosphate
  modified_base 6: mod_base = OTHER; note = 2'-deoxy-2'-fluorouridine-3'-phosphate
  modified_base 7: mod_base = OTHER; note = 2'-O-methyluridine-3'-phosphate
  modified_base 8: mod_base = OTHER; note = 2'-deoxy-2'-fluoroguanosine-3'-phosphate
  modified_base 9: mod_base = OTHER; note = 2'-deoxy-2'-fluoroadenosine-3'-phosphate
  modified_base 10: mod_base = OTHER; note = 2'-O-methyluridine-3'-phosphate
  modified_base 11: mod_base = OTHER; note = 2'-O-methyluridine-3'-phosphate
  modified_base 12: mod_base = OTHER; note = 2'-O-methylcytidine-3'-phosphate
  modified_base 13: mod_base = OTHER; note = 2'-O-methyladenosine-3'-phosphate
  modified_base 14: mod_base = OTHER; note = 2'-deoxy-2'-fluoroadenosine-3'-phosphate
  modified_base 15: mod_base = OTHER; note = 2'-O-methylguanosine-3'-phosphate
  modified_base 16: mod_base = OTHER; note = 2'-deoxy-2'-fluoroadenosine-3'-phosphate
  modified_base 17: mod_base = OTHER; note = 2'-O-methylcytidine-3'-phosphate
  modified_base 18: mod_base = OTHER; note = 2'-O-methyladenosine-3'-phosphate
  modified_base 19: mod_base = OTHER; note = 2'-O-methyluridine-3'-phosphate
  modified_base 20: mod_base = OTHER; note = 2'-O-methyladenosine-3'-phosphate
  modified_base 21: mod_base = OTHER; note = 2'-O-methyladenosine-3'-phosphorothioate
  modified_base 22: mod_base = OTHER; note = 2'-O-methylcytidine-3'-phosphorothioate
  modified_base 23: mod_base = OTHER; note = 2'-O-methylcytidine
taagtttgattcaagacataacc

SEQ ID NO: 1995 - RNA, 23 nt, synthetic construct
  source 1..23: mol_type = other RNA
  modified_base 1: mod_base = OTHER; note = 2'-O-methyluridine-3'-phosphorothioate 5'-(E)-Vinylphosphonate
  modified_base 2: mod_base = OTHER; note = 2'-deoxy-2'-fluoroadenosine-3'-phosphorothioate
  modified_base 3: mod_base = OTHER; note = 2'-O-methyladenosine-3'-phosphate
  modified_base 4: mod_base = OTHER; note = 2'-O-methylcytidine-3'-phosphate
  modified_base 5: mod_base = OTHER; note = 2'-O-methylcytidine-3'-phosphate
  modified_base 6: mod_base = OTHER; note = 2'-deoxy-2'-fluorouridine-3'-phosphate
  modified_base 7: mod_base = OTHER; note = 2'-O-methyluridine-3'-phosphate
  modified_base 8: mod_base = OTHER; note = 2'-deoxy-2'-fluorouridine-3'-phosphate
  modified_base 9: mod_base = OTHER; note = 2'-deoxy-2'-fluoroguanosine-3'-phosphate
  modified_base 10: mod_base = OTHER; note = 2'-O-methyladenosine-3'-phosphate
  modified_base 11: mod_base = OTHER; note = 2'-O-methyladenosine-3'-phosphate
  modified_base 12: mod_base = OTHER; note = 2'-O-methylcytidine-3'-phosphate
  modified_base 13: mod_base = OTHER; note = 2'-O-methyladenosine-3'-phosphate
  modified_base 14: mod_base = OTHER; note = 2'-deoxy-2'-fluoroadenosine-3'-phosphate
  modified_base 15: mod_base = OTHER; note = 2'-O-methyladenosine-3'-phosphate
  modified_base 16: mod_base = OTHER; note = 2'-deoxy-2'-fluorouridine-3'-phosphate
  modified_base 17: mod_base = OTHER; note = 2'-O-methylguanosine-3'-phosphate
  modified_base 18: mod_base = OTHER; note = 2'-O-methyluridine-3'-phosphate
  modified_base 19: mod_base = OTHER; note = 2'-O-methylguanosine-3'-phosphate
  modified_base 20: mod_base = OTHER; note = 2'-O-methyluridine-3'-phosphate
  modified_base 21: mod_base = OTHER; note = 2'-O-methylcytidine-3'-phosphorothioate
  modified_base 22: mod_base = OTHER; note = 2'-O-methylcytidine-3'-phosphorothioate
  modified_base 23: mod_base = OTHER; note = 2'-O-methyladenosine
taacctttgaacaaatgtgtcca

SEQ ID NO: 1996 - RNA, 23 nt, synthetic construct
  source 1..23: mol_type = other RNA
  modified_base 1: mod_base = OTHER; note = 2'-O-methyluridine-3'-phosphorothioate 5'-(E)-Vinylphosphonate
  modified_base 2: mod_base = OTHER; note = 2'-deoxy-2'-fluoroadenosine-3'-phosphorothioate
  modified_base 3: mod_base = OTHER; note = 2'-O-methyladenosine-3'-phosphate
  modified_base 4: mod_base = OTHER; note = 2'-O-methyladenosine-3'-phosphate
  modified_base 5: mod_base = OTHER; note = 2'-O-methylcytidine-3'-phosphate
  modified_base 6: mod_base = OTHER; note = 2'-deoxy-2'-fluoroadenosine-3'-phosphate
  modified_base 7: mod_base = OTHER; note = 2'-O-methyladenosine-3'-phosphate
  modified_base 8: mod_base = OTHER; note = 2'-deoxy-2'-fluoroguanosine-3'-phosphate
  modified_base 9: mod_base = OTHER; note = 2'-deoxy-2'-fluoroadenosine-3'-phosphate
  modified_base 10: mod_base = OTHER; note = 2'-O-methyladenosine-3'-phosphate
  modified_base 11: mod_base = OTHER; note = 2'-O-methylcytidine-3'-phosphate
  modified_base 12: mod_base = OTHER; note = 2'-O-methylcytidine-3'-phosphate
  modified_base 13: mod_base = OTHER; note = 2'-O-methyluridine-3'-phosphate
  modified_base 14: mod_base = OTHER; note = 2'-deoxy-2'-fluorouridine-3'-phosphate
  modified_base 15: mod_base = OTHER; note = 2'-O-methyluridine-3'-phosphate
  modified_base 16: mod_base = OTHER; note = 2'-deoxy-2'-fluoroguanosine-3'-phosphate
  modified_base 17: mod_base = OTHER; note = 2'-O-methyladenosine-3'-phosphate
  modified_base 18: mod_base = OTHER; note = 2'-O-methyladenosine-3'-phosphate
  modified_base 19: mod_base = OTHER; note = 2'-O-methylcytidine-3'-phosphate
  modified_base 20: mod_base = OTHER; note = 2'-O-methyladenosine-3'-phosphate
  modified_base 21: mod_base = OTHER; note = 2'-O-methyladenosine-3'-phosphorothioate
  modified_base 22: mod_base = OTHER; note = 2'-O-methyladenosine-3'-phosphorothioate
  modified_base 23: mod_base = OTHER; note = 2'-O-methyluridine
taaacaagaacctttgaacaaat

SEQ ID NO: 1997 - RNA, 23 nt, synthetic construct
  source 1..23: mol_type = other RNA
  modified_base 1: mod_base = OTHER; note = 2'-O-methyluridine-3'-phosphorothioate 5'-(E)-Vinylphosphonate
  modified_base 2: mod_base = OTHER; note = 2'-deoxy-2'-fluorouridine-3'-phosphorothioate
  modified_base 3: mod_base = OTHER; note = 2'-O-methyladenosine-3'-phosphate
  modified_base 4: mod_base = OTHER; note = 2'-O-methyladenosine-3'-phosphate
  modified_base 5: mod_base = OTHER; note = 2'-O-methyladenosine-3'-phosphate
  modified_base 6: mod_base = OTHER; note = 2'-deoxy-2'-fluorocytidine-3'-phosphate
  modified_base 7: mod_base = OTHER; note = 2'-O-methyladenosine-3'-phosphate
  modified_base 8: mod_base = OTHER; note = 2'-deoxy-2'-fluoroadenosine-3'-phosphate
  modified_base 9: mod_base = OTHER; note = 2'-deoxy-2'-fluoroguanosine-3'-phosphate
  modified_base 10: mod_base = OTHER; note = 2'-O-methyladenosine-3'-phosphate
  modified_base 11: mod_base = OTHER; note = 2'-O-methyladenosine-3'-phosphate
  modified_base 12: mod_base = OTHER; note = 2'-O-methylcytidine-3'-phosphate
  modified_base 13: mod_base = OTHER; note = 2'-O-methylcytidine-3'-phosphate
  modified_base 14: mod_base = OTHER; note = 2'-deoxy-2'-fluorouridine-3'-phosphate
  modified_base 15: mod_base = OTHER; note = 2'-O-methyluridine-3'-phosphate
  modified_base 16: mod_base = OTHER; note = 2'-deoxy-2'-fluorouridine-3'-phosphate
  modified_base 17: mod_base = OTHER; note = 2'-O-methylguanosine-3'-phosphate
  modified_base 18: mod_base = OTHER; note = 2'-O-methyladenosine-3'-phosphate
  modified_base 19: mod_base = OTHER; note = 2'-O-methyladenosine-3'-phosphate
  modified_base 20: mod_base = OTHER; note = 2'-O-methylcytidine-3'-phosphate
  modified_base 21: mod_base = OTHER; note = 2'-O-methyladenosine-3'-phosphorothioate
  modified_base 22: mod_base = OTHER; note = 2'-O-methyladenosine-3'-phosphorothioate
  modified_base 23: mod_base = OTHER; note = 2'-O-methyladenosine
ttaaacaagaacctttgaacaaa

SEQ ID NO: 1998 - RNA, 23 nt, synthetic construct
  source 1..23: mol_type = other RNA
  modified_base 1: mod_base = OTHER; note = 2'-O-methyluridine-3'-phosphorothioate 5'-(E)-Vinylphosphonate
  modified_base 2: mod_base = OTHER; note = 2'-deoxy-2'-fluorouridine-3'-phosphorothioate
  modified_base 3: mod_base = OTHER; note = 2'-O-methyluridine-3'-phosphate
  modified_base 4: mod_base = OTHER; note = 2'-O-methyladenosine-3'-phosphate
  modified_base 5: mod_base = OTHER; note = 2'-O-methyladenosine-3'-phosphate
  modified_base 6: mod_base = OTHER; note = 2'-deoxy-2'-fluoroadenosine-3'-phosphate
  modified_base 7: mod_base = OTHER; note = 2'-O-methylcytidine-3'-phosphate
  modified_base 8: mod_base = OTHER; note = 2'-deoxy-2'-fluoroadenosine-3'-phosphate
  modified_base 9: mod_base = OTHER; note = 2'-deoxy-2'-fluoroadenosine-3'-phosphate
  modified_base 10: mod_base = OTHER; note = 2'-O-methylguanosine-3'-phosphate
  modified_base 11: mod_base = OTHER; note = 2'-O-methyladenosine-3'-phosphate
  modified_base 12: mod_base = OTHER; note = 2'-O-methyladenosine-3'-phosphate
  modified_base 13: mod_base = OTHER; note = 2'-O-methylcytidine-3'-phosphate
  modified_base 14: mod_base = OTHER; note = 2'-deoxy-2'-fluorocytidine-3'-phosphate
  modified_base 15: mod_base = OTHER; note = 2'-O-methyluridine-3'-phosphate
  modified_base 16: mod_base = OTHER; note = 2'-deoxy-2'-fluorouridine-3'-phosphate
  modified_base 17: mod_base = OTHER; note = 2'-O-methyluridine-3'-phosphate
  modified_base 18: mod_base = OTHER; note = 2'-O-methylguanosine-3'-phosphate
  modified_base 19: mod_base = OTHER; note = 2'-O-methyladenosine-3'-phosphate
  modified_base 20: mod_base = OTHER; note = 2'-O-methyladenosine-3'-phosphate
  modified_base 21: mod_base = OTHER; note = 2'-O-methylcytidine-3'-phosphorothioate
  modified_base 22: mod_base = OTHER; note = 2'-O-methyladenosine-3'-phosphorothioate
  modified_base 23: mod_base = OTHER; note = 2'-O-methyladenosine
tttaaacaagaacctttgaacaa

SEQ ID NO: 1999 - RNA, 23 nt, synthetic construct
  source 1..23: mol_type = other RNA
  modified_base 1: mod_base = OTHER; note = 2'-O-methyluridine-3'-phosphorothioate 5'-(E)-Vinylphosphonate
  modified_base 2: mod_base = OTHER; note = 2'-deoxy-2'-fluoroadenosine-3'-phosphorothioate
  modified_base 3: mod_base = OTHER; note = 2'-O-methylguanosine-3'-phosphate
  modified_base 4: mod_base = OTHER; note = 2'-O-methyluridine-3'-phosphate
  modified_base 5: mod_base = OTHER; note = 2'-O-methyluridine-3'-phosphate
  modified_base 6: mod_base = OTHER; note = 2'-deoxy-2'-fluoroadenosine-3'-phosphate
  modified_base 7: mod_base = OTHER; note = 2'-O-methyladenosine-3'-phosphate
  modified_base 8: mod_base = OTHER; note = 2'-deoxy-2'-fluoroadenosine-3'-phosphate
  modified_base 9: mod_base = OTHER; note = 2'-deoxy-2'-fluorocytidine-3'-phosphate
  modified_base 10: mod_base = OTHER; note = 2'-O-methyladenosine-3'-phosphate
  modified_base 11: mod_base = OTHER; note = 2'-O-methyladenosine-3'-phosphate
  modified_base 12: mod_base = OTHER; note = 2'-O-methylguanosine-3'-phosphate
  modified_base 13: mod_base = OTHER; note = 2'-O-methyladenosine-3'-phosphate
  modified_base 14: mod_base = OTHER; note = 2'-deoxy-2'-fluoroadenosine-3'-phosphate
  modified_base 15: mod_base = OTHER; note = 2'-O-methylcytidine-3'-phosphate
  modified_base 16: mod_base = OTHER; note = 2'-deoxy-2'-fluorocytidine-3'-phosphate
  modified_base 17: mod_base = OTHER; note = 2'-O-methyluridine-3'-phosphate
  modified_base 18: mod_base = OTHER; note = 2'-O-methyluridine-3'-phosphate
  modified_base 19: mod_base = OTHER; note = 2'-O-methyluridine-3'-phosphate
  modified_base 20: mod_base = OTHER; note = 2'-O-methylguanosine-3'-phosphate
  modified_base 21: mod_base = OTHER; note = 2'-O-methyladenosine-3'-phosphorothioate
  modified_base 22: mod_base = OTHER; note = 2'-O-methyladenosine-3'-phosphorothioate
  modified_base 23: mod_base = OTHER; note = 2'-O-methylcytidine
tagttaaacaagaacctttgaac

SEQ ID NO: 2000 - RNA, 23 nt, synthetic construct
  source 1..23: mol_type = other RNA
  modified_base 1: mod_base = OTHER; note = 2'-O-methyluridine-3'-phosphorothioate 5'-(E)-Vinylphosphonate
  modified_base 2: mod_base = OTHER; note = 2'-deoxy-2'-fluorouridine-3'-phosphorothioate
  modified_base 3: mod_base = OTHER; note = 2'-O-methyladenosine-3'-phosphate
  modified_base 4: mod_base = OTHER; note = 2'-O-methyladenosine-3'-phosphate
  modified_base 5: mod_base = OTHER; note = 2'-O-methylcytidine-3'-phosphate
  modified_base 6: mod_base = OTHER; note = 2'-deoxy-2'-fluoroadenosine-3'-phosphate
  modified_base 7: mod_base = OTHER; note = 2'-O-methyladenosine-3'-phosphate
  modified_base 8: mod_base = OTHER; note = 2'-deoxy-2'-fluoroguanosine-3'-phosphate
  modified_base 9: mod_base = OTHER; note = 2'-deoxy-2'-fluorouridine-3'-phosphate
  modified_base 10: mod_base = OTHER; note = 2'-O-methyluridine-3'-phosphate
  modified_base 11: mod_base = OTHER; note = 2'-O-methyladenosine-3'-phosphate
  modified_base 12: mod_base = OTHER; note = 2'-O-methyladenosine-3'-phosphate
  modified_base 13: mod_base = OTHER; note = 2'-O-methyladenosine-3'-phosphate
  modified_base 14: mod_base = OTHER; note = 2'-deoxy-2'-fluorocytidine-3'-phosphate
  modified_base 15: mod_base = OTHER; note = 2'-O-methyladenosine-3'-phosphate
  modified_base 16: mod_base = OTHER; note = 2'-deoxy-2'-fluoroadenosine-3'-phosphate
  modified_base 17: mod_base = OTHER; note = 2'-O-methylguanosine-3'-phosphate
  modified_base 18: mod_base = OTHER; note = 2'-O-methyladenosine-3'-phosphate
  modified_base 19: mod_base = OTHER; note = 2'-O-methyladenosine-3'-phosphate
  modified_base 20: mod_base = OTHER; note = 2'-O-methylcytidine-3'-phosphate
  modified_base 21: mod_base = OTHER; note = 2'-O-methylcytidine-3'-phosphorothioate
  modified_base 22: mod_base = OTHER; note = 2'-O-methyluridine-3'-phosphorothioate
  modified_base 23: mod_base = OTHER; note = 2'-O-methyluridine
ttaacaagttaaacaagaacctt

SEQ ID NO: 2001 - RNA, 23 nt, synthetic construct
  source 1..23: mol_type = other RNA
  modified_base 1: mod_base = OTHER; note = 2'-O-methyluridine-3'-phosphorothioate 5'-(E)-Vinylphosphonate
  modified_base 2: mod_base = OTHER; note = 2'-deoxy-2'-fluorocytidine-3'-phosphorothioate
  modified_base 3: mod_base = OTHER; note = 2'-O-methyluridine-3'-phosphate
  modified_base 4: mod_base = OTHER; note = 2'-O-methyladenosine-3'-phosphate
  modified_base 5: mod_base = OTHER; note = 2'-O-methyladenosine-3'-phosphate
  modified_base 6: mod_base = OTHER; note = 2'-deoxy-2'-fluorocytidine-3'-phosphate
  modified_base 7: mod_base = OTHER; note = 2'-O-methyladenosine-3'-phosphate
  modified_base 8: mod_base = OTHER; note = 2'-deoxy-2'-fluoroadenosine-3'-phosphate
  modified_base 9: mod_base = OTHER; note = 2'-deoxy-2'-fluoroguanosine-3'-phosphate
  modified_base 10: mod_base = OTHER; note = 2'-O-methyluridine-3'-phosphate
  modified_base 11: mod_base = OTHER; note = 2'-O-methyluridine-3'-phosphate
  modified_base 12: mod_base = OTHER; note = 2'-O-methyladenosine-3'-phosphate
  modified_base 13: mod_base = OTHER; note = 2'-O-methyladenosine-3'-phosphate
  modified_base 14: mod_base = OTHER; note = 2'-deoxy-2'-fluoroadenosine-3'-phosphate
  modified_base 15: mod_base = OTHER; note = 2'-O-methylcytidine-3'-phosphate
  modified_base 16: mod_base = OTHER; note = 2'-deoxy-2'-fluoroadenosine-3'-phosphate
  modified_base 17: mod_base = OTHER; note = 2'-O-methyladenosine-3'-phosphate
  modified_base 18: mod_base = OTHER; note = 2'-O-methylguanosine-3'-phosphate
  modified_base 19: mod_base = OTHER; note = 2'-O-methyladenosine-3'-phosphate
  modified_base 20: mod_base = OTHER; note = 2'-O-methyladenosine-3'-phosphate
  modified_base 21: mod_base = OTHER; note = 2'-O-methylcytidine-3'-phosphorothioate
  modified_base 22: mod_base = OTHER; note = 2'-O-methylcytidine-3'-phosphorothioate
  modified_base 23: mod_base = OTHER; note = 2'-O-methyluridine
tctaacaagttaaacaagaacct

SEQ ID NO: 2002 - RNA, 23 nt, synthetic construct
  source 1..23: mol_type = other RNA
  modified_base 1: mod_base = OTHER; note = 2'-O-methyluridine-3'-phosphorothioate 5'-(E)-Vinylphosphonate
  modified_base 2: mod_base = OTHER; note = 2'-deoxy-2'-fluorouridine-3'-phosphorothioate
  modified_base 3: mod_base = OTHER; note = 2'-O-methylcytidine-3'-phosphate
  modified_base 4: mod_base = OTHER; note = 2'-O-methyluridine-3'-phosphate
  modified_base 5: mod_base = OTHER; note = 2'-O-methyladenosine-3'-phosphate
  modified_base 6: mod_base = OTHER; note = 2'-deoxy-2'-fluoroadenosine-3'-phosphate
  modified_base 7: mod_base = OTHER; note = 2'-O-methylcytidine-3'-phosphate
  modified_base 8: mod_base = OTHER; note = 2'-deoxy-2'-fluoroadenosine-3'-phosphate
  modified_base 9: mod_base = OTHER; note = 2'-deoxy-2'-fluoroadenosine-3'-phosphate
  modified_base 10: mod_base = OTHER; note = 2'-O-methylguanosine-3'-phosphate
  modified_base 11: mod_base = OTHER; note = 2'-O-methyluridine-3'-phosphate
  modified_base 12: mod_base = OTHER; note = 2'-O-methyluridine-3'-phosphate
  modified_base 13: mod_base = OTHER; note = 2'-O-methyladenosine-3'-phosphate
  modified_base 14: mod_base = OTHER; note = 2'-deoxy-2'-fluoroadenosine-3'-phosphate
  modified_base 15: mod_base = OTHER; note = 2'-O-methyladenosine-3'-phosphate
  modified_base 16: mod_base = OTHER; note = 2'-deoxy-2'-fluorocytidine-3'-phosphate
  modified_base 17: mod_base = OTHER; note = 2'-O-methyladenosine-3'-phosphate
  modified_base 18: mod_base = OTHER; note = 2'-O-methyladenosine-3'-phosphate
  modified_base 19: mod_base = OTHER; note = 2'-O-methylguanosine-3'-phosphate
  modified_base 20: mod_base = OTHER; note = 2'-O-methyladenosine-3'-phosphate
  modified_base 21: mod_base = OTHER; note = 2'-O-methyladenosine-3'-phosphorothioate
  modified_base 22: mod_base = OTHER; note = 2'-O-methylcytidine-3'-phosphorothioate
  modified_base 23: mod_base = OTHER; note = 2'-O-methylcytidine
ttctaacaagttaaacaagaacc

SEQ ID NO: 2003 - RNA, 23 nt, synthetic construct
  source 1..23: mol_type = other RNA
  modified_base 1: mod_base = OTHER; note = 2'-O-methyluridine-3'-phosphorothioate 5'-(E)-Vinylphosphonate
  modified_base 2: mod_base = OTHER; note = 2'-deoxy-2'-fluorouridine-3'-phosphorothioate
  modified_base 3: mod_base = OTHER; note = 2'-O-methyluridine-3'-phosphate
  modified_base 4: mod_base = OTHER; note = 2'-O-methyladenosine-3'-phosphate
  modified_base 5: mod_base = OTHER; note = 2'-O-methyladenosine-3'-phosphate
  modified_base 6: mod_base = OTHER; note = 2'-deoxy-2'-fluorouridine-3'-phosphate
  modified_base 7: mod_base = OTHER; note = 2'-O-methyluridine-3'-phosphate
  modified_base 8: mod_base = OTHER; note = 2'-deoxy-2'-fluoroguanosine-3'-phosphate
  modified_base 9: mod_base = OTHER; note = 2'-deoxy-2'-fluoroadenosine-3'-phosphate
  modified_base 10: mod_base = OTHER; note = 2'-O-methyluridine-3'-phosphate
  modified_base 11: mod_base = OTHER; note = 2'-O-methyluridine-3'-phosphate
  modified_base 12: mod_base = OTHER; note = 2'-O-methyluridine-3'-phosphate
  modified_base 13: mod_base = OTHER; note = 2'-O-methylcytidine-3'-phosphate
  modified_base 14: mod_base = OTHER; note = 2'-deoxy-2'-fluorouridine-3'-phosphate
  modified_base 15: mod_base = OTHER; note = 2'-O-methylcytidine-3'-phosphate
  modified_base 16: mod_base = OTHER; note = 2'-deoxy-2'-fluorocytidine-3'-phosphate
  modified_base 17: mod_base = OTHER; note = 2'-O-methyladenosine-3'-phosphate
  modified_base 18: mod_base = OTHER; note = 2'-O-methyladenosine-3'-phosphate
  modified_base 19: mod_base = OTHER; note = 2'-O-methyladenosine-3'-phosphate
  modified_base 20: mod_base = OTHER; note = 2'-O-methylguanosine-3'-phosphate
  modified_base 21: mod_base = OTHER; note = 2'-O-methylcytidine-3'-phosphorothioate
  modified_base 22: mod_base = OTHER; note = 2'-O-methyluridine-3'-phosphorothioate
  modified_base 23: mod_base = OTHER; note = 2'-O-methyladenosine
tttaattgatttctccaaagcta

SEQ ID NO: 2004 - RNA, 23 nt, synthetic construct
  source 1..23: mol_type = other RNA
  modified_base 1: mod_base = OTHER; note = 2'-O-methyluridine-3'-phosphorothioate 5'-(E)-Vinylphosphonate
  modified_base 2: mod_base = OTHER; note = 2'-deoxy-2'-fluoroguanosine-3'-phosphorothioate
  modified_base 3: mod_base = OTHER; note = 2'-O-methyluridine-3'-phosphate
  modified_base 4: mod_base = OTHER; note = 2'-O-methyluridine-3'-phosphate
  modified_base 5: mod_base = OTHER; note = 2'-O-methyladenosine-3'-phosphate
  modified_base 6: mod_base = OTHER; note = 2'-deoxy-2'-fluoroadenosine-3'-phosphate
  modified_base 7: mod_base = OTHER; note = 2'-O-methyluridine-3'-phosphate
  modified_base 8: mod_base = OTHER; note = 2'-deoxy-2'-fluorouridine-3'-phosphate
  modified_base 9: mod_base = OTHER; note = 2'-deoxy-2'-fluoroguanosine-3'-phosphate
  modified_base 10: mod_base = OTHER; note = 2'-O-methyladenosine-3'-phosphate
  modified_base 11: mod_base = OTHER; note = 2'-O-methyluridine-3'-phosphate
  modified_base 12: mod_base = OTHER; note = 2'-O-methyluridine-3'-phosphate
  modified_base 13: mod_base = OTHER; note = 2'-O-methyluridine-3'-phosphate
  modified_base 14: mod_base = OTHER; note = 2'-deoxy-2'-fluorocytidine-3'-phosphate
  modified_base 15: mod_base = OTHER; note = 2'-O-methyluridine-3'-phosphate
  modified_base 16: mod_base = OTHER; note = 2'-deoxy-2'-fluorocytidine-3'-phosphate
  modified_base 17: mod_base = OTHER; note = 2'-O-methylcytidine-3'-phosphate
  modified_base 18: mod_base = OTHER; note = 2'-O-methyladenosine-3'-phosphate
  modified_base 19: mod_base = OTHER; note = 2'-O-methyladenosine-3'-phosphate
  modified_base 20: mod_base = OTHER; note = 2'-O-methyladenosine-3'-phosphate
  modified_base 21: mod_base = OTHER; note = 2'-O-methylguanosine-3'-phosphorothioate
  modified_base 22: mod_base = OTHER; note = 2'-O-methylcytidine-3'-phosphorothioate
  modified_base 23: mod_base = OTHER; note = 2'-O-methyluridine
tgttaattgatttctccaaagct

SEQ ID NO: 2005 - RNA, 23 nt, synthetic construct
  source 1..23: mol_type = other RNA
  modified_base 1: mod_base = OTHER; note = 2'-O-methyluridine-3'-phosphorothioate 5'-(E)-Vinylphosphonate
  modified_base 2: mod_base = OTHER; note = 2'-deoxy-2'-fluorouridine-3'-phosphorothioate
  modified_base 3: mod_base = OTHER; note = 2'-O-methylguanosine-3'-phosphate
  modified_base 4: mod_base = OTHER; note = 2'-O-methyluridine-3'-phosphate
  modified_base 5: mod_base = OTHER; note = 2'-O-methyluridine-3'-phosphate
  modified_base 6: mod_base = OTHER; note = 2'-deoxy-2'-fluoroadenosine-3'-phosphate
  modified_base 7: mod_base = OTHER; note = 2'-O-methyladenosine-3'-phosphate
  modified_base 8: mod_base = OTHER; note = 2'-deoxy-2'-fluorouridine-3'-phosphate
  modified_base 9: mod_base = OTHER; note = 2'-deoxy-2'-fluorouridine-3'-phosphate
  modified_base 10: mod_base = OTHER; note = 2'-O-methylguanosine-3'-phosphate
  modified_base 11: mod_base = OTHER; note = 2'-O-methyladenosine-3'-phosphate
  modified_base 12: mod_base = OTHER; note = 2'-O-methyluridine-3'-phosphate
  modified_base 13: mod_base = OTHER; note = 2'-O-methyluridine-3'-phosphate
  modified_base 14: mod_base = OTHER; note = 2'-deoxy-2'-fluorouridine-3'-phosphate
  modified_base 15: mod_base = OTHER; note = 2'-O-methylcytidine-3'-phosphate
  modified_base 16: mod_base = OTHER; note = 2'-deoxy-2'-fluorouridine-3'-phosphate
  modified_base 17: mod_base = OTHER; note = 2'-O-methylcytidine-3'-phosphate
  modified_base 18: mod_base = OTHER; note = 2'-O-methylcytidine-3'-phosphate
  modified_base 19: mod_base = OTHER; note = 2'-O-methyladenosine-3'-phosphate
  modified_base 20: mod_base = OTHER; note = 2'-O-methyladenosine-3'-phosphate
  modified_base 21: mod_base = OTHER; note = 2'-O-methyladenosine-3'-phosphorothioate
  modified_base 22: mod_base = OTHER; note = 2'-O-methylguanosine-3'-phosphorothioate
  modified_base 23: mod_base = OTHER; note = 2'-O-methylcytidine
ttgttaattgatttctccaaagc

SEQ ID NO: 2006 - RNA, 23 nt, synthetic construct
  source 1..23: mol_type = other RNA
  modified_base 1: mod_base = OTHER; note = 2'-O-methyluridine-3'-phosphorothioate 5'-(E)-Vinylphosphonate
  modified_base 2: mod_base = OTHER; note = 2'-deoxy-2'-fluorouridine-3'-phosphorothioate
  modified_base 3: mod_base = OTHER; note = 2'-O-methyluridine-3'-phosphate
  modified_base 4: mod_base = OTHER; note = 2'-O-methylguanosine-3'-phosphate
  modified_base 5: mod_base = OTHER; note = 2'-O-methyluridine-3'-phosphate
  modified_base 6: mod_base = OTHER; note = 2'-deoxy-2'-fluorouridine-3'-phosphate
  modified_base 7: mod_base = OTHER; note = 2'-O-methyladenosine-3'-phosphate
  modified_base 8: mod_base = OTHER; note = 2'-deoxy-2'-fluoroadenosine-3'-phosphate
  modified_base 9: mod_base = OTHER; note = 2'-deoxy-2'-fluorouridine-3'-phosphate
  modified_base 10: mod_base = OTHER; note = 2'-O-methyluridine-3'-phosphate
  modified_base 11: mod_base = OTHER; note = 2'-O-methylguanosine-3'-phosphate
  modified_base 12: mod_base = OTHER; note = 2'-O-methyladenosine-3'-phosphate
  modified_base 13: mod_base = OTHER; note = 2'-O-methyluridine-3'-phosphate
  modified_base 14: mod_base = OTHER; note = 2'-deoxy-2'-fluorouridine-3'-phosphate
  modified_base 15: mod_base = OTHER; note = 2'-O-methyluridine-3'-phosphate
  modified_base 16: mod_base = OTHER; note = 2'-deoxy-2'-fluorocytidine-3'-phosphate
  modified_base 17: mod_base = OTHER; note = 2'-O-methyluridine-3'-phosphate
  modified_base 18: mod_base = OTHER; note = 2'-O-methylcytidine-3'-phosphate
  modified_base 19: mod_base = OTHER; note = 2'-O-methylcytidine-3'-phosphate
  modified_base 20: mod_base = OTHER; note = 2'-O-methyladenosine-3'-phosphate
  modified_base 21: mod_base = OTHER; note = 2'-O-methyladenosine-3'-phosphorothioate
  modified_base 22: mod_base = OTHER; note = 2'-O-methyladenosine-3'-phosphorothioate
  modified_base 23: mod_base = OTHER; note = 2'-O-methylguanosine
tttgttaattgatttctccaaag

SEQ ID NO: 2007 - RNA, 23 nt, synthetic construct
  source 1..23: mol_type = other RNA
  modified_base 1: mod_base = OTHER; note = 2'-O-methyluridine-3'-phosphorothioate 5'-(E)-Vinylphosphonate
  modified_base 2: mod_base = OTHER; note = 2'-deoxy-2'-fluoroadenosine-3'-phosphorothioate
  modified_base 3: mod_base = OTHER; note = 2'-O-methyladenosine-3'-phosphate
  modified_base 4: mod_base = OTHER; note = 2'-O-methylcytidine-3'-phosphate
  modified_base 5: mod_base = OTHER; note = 2'-O-methyladenosine-3'-phosphate
  modified_base 6: mod_base = OTHER; note = 2'-deoxy-2'-fluoroadenosine-3'-phosphate
  modified_base 7: mod_base = OTHER; note = 2'-O-methyluridine-3'-phosphate
  modified_base 8: mod_base = OTHER; note = 2'-deoxy-2'-fluoroadenosine-3'-phosphate
  modified_base 9: mod_base = OTHER; note = 2'-deoxy-2'-fluorocytidine-3'-phosphate
  modified_base 10: mod_base = OTHER; note = 2'-O-methyladenosine-3'-phosphate
  modified_base 11: mod_base = OTHER; note = 2'-O-methylguanosine-3'-phosphate
  modified_base 12: mod_base = OTHER; note = 2'-O-methyladenosine-3'-phosphate
  modified_base 13: mod_base = OTHER; note = 2'-O-methyladenosine-3'-phosphate
  modified_base 14: mod_base = OTHER; note = 2'-deoxy-2'-fluoroadenosine-3'-phosphate
  modified_base 15: mod_base = OTHER; note = 2'-O-methyladenosine-3'-phosphate
  modified_base 16: mod_base = OTHER; note = 2'-deoxy-2'-fluorocytidine-3'-phosphate
  modified_base 17: mod_base = OTHER; note = 2'-O-methylcytidine-3'-phosphate
  modified_base 18: mod_base = OTHER; note = 2'-O-methylcytidine-3'-phosphate
  modified_base 19: mod_base = OTHER; note = 2'-O-methyluridine-3'-phosphate
  modified_base 20: mod_base = OTHER; note = 2'-O-methylguanosine-3'-phosphate
  modified_base 21: mod_base = OTHER; note = 2'-O-methylguanosine-3'-phosphorothioate
  modified_base 22: mod_base = OTHER; note = 2'-O-methyladenosine-3'-phosphorothioate
  modified_base 23: mod_base = OTHER; note = 2'-O-methyladenosine
taacaatacagaaaaccctggaa

SEQ ID NO: 2008 - RNA, 23 nt, synthetic construct
  source 1..23: mol_type = other RNA
  modified_base 1: mod_base = OTHER; note = 2'-O-methyluridine-3'-phosphorothioate 5'-(E)-Vinylphosphonate
  modified_base 2: mod_base = OTHER; note = 2'-deoxy-2'-fluoroadenosine-3'-phosphorothioate
  modified_base 3: mod_base = OTHER; note = 2'-O-methyladenosine-3'-phosphate
  modified_base 4: mod_base = OTHER; note = 2'-O-methyladenosine-3'-phosphate
  modified_base 5: mod_base = OTHER; note = 2'-O-methylcytidine-3'-phosphate
  modified_base 6: mod_base = OTHER; note = 2'-deoxy-2'-fluoroadenosine-3'-phosphate
  modified_base 7: mod_base = OTHER; note = 2'-O-methyladenosine-3'-phosphate
  modified_base 8: mod_base = OTHER; note = 2'-deoxy-2'-fluorouridine-3'-phosphate
  modified_base 9: mod_base = OTHER; note = 2'-deoxy-2'-fluoroadenosine-3'-phosphate
  modified_base 10: mod_base = OTHER; note = 2'-O-methylcytidine-3'-phosphate
  modified_base 11: mod_base = OTHER; note = 2'-O-methyladenosine-3'-phosphate
  modified_base 12: mod_base = OTHER; note = 2'-O-methylguanosine-3'-phosphate
  modified_base 13: mod_base = OTHER; note = 2'-O-methyladenosine-3'-phosphate
  modified_base 14: mod_base = OTHER; note = 2'-deoxy-2'-fluoroadenosine-3'-phosphate
  modified_base 15: mod_base = OTHER; note = 2'-O-methyladenosine-3'-phosphate
  modified_base 16: mod_base = OTHER; note = 2'-deoxy-2'-fluoroadenosine-3'-phosphate
  modified_base 17: mod_base = OTHER; note = 2'-O-methylcytidine-3'-phosphate
  modified_base 18: mod_base = OTHER; note = 2'-O-methylcytidine-3'-phosphate
  modified_base 19: mod_base = OTHER; note = 2'-O-methylcytidine-3'-phosphate
  modified_base 20: mod_base = OTHER; note = 2'-O-methyluridine-3'-phosphate
  modified_base 21: mod_base = OTHER; note = 2'-O-methylguanosine-3'-phosphorothioate
  modified_base 22: mod_base = OTHER; note = 2'-O-methylguanosine-3'-phosphorothioate
  modified_base 23: mod_base = OTHER; note = 2'-O-methyladenosine
taaacaatacagaaaaccctgga

SEQ ID NO: 2009 - RNA, 23 nt, synthetic construct
  source 1..23: mol_type = other RNA
  modified_base 1: mod_base = OTHER; note = 2'-O-methyluridine-3'-phosphorothioate 5'-(E)-Vinylphosphonate
  modified_base 2: mod_base = OTHER; note = 2'-deoxy-2'-fluoroadenosine-3'-phosphorothioate
  modified_base 3: mod_base = OTHER; note = 2'-O-methyladenosine-3'-phosphate
  modified_base 4: mod_base = OTHER; note = 2'-O-methylguanosine-3'-phosphate
  modified_base 5: mod_base = OTHER; note = 2'-O-methyluridine-3'-phosphate
  modified_base 6: mod_base = OTHER; note = 2'-deoxy-2'-fluorouridine-3'-phosphate
  modified_base 7: mod_base = OTHER; note = 2'-O-methyladenosine-3'-phosphate
  modified_base 8: mod_base = OTHER; note = 2'-deoxy-2'-fluorouridine-3'-phosphate
  modified_base 9: mod_base = OTHER; note = 2'-deoxy-2'-fluorocytidine-3'-phosphate
  modified_base 10: mod_base = OTHER; note = 2'-O-methylcytidine-3'-phosphate
  modified_base 11: mod_base = OTHER; note = 2'-O-methyladenosine-3'-phosphate
  modified_base 12: mod_base = OTHER; note = 2'-O-methyladenosine-3'-phosphate
  modified_base 13: mod_base = OTHER; note = 2'-O-methyladenosine-3'-phosphate
  modified_base 14: mod_base = OTHER; note = 2'-deoxy-2'-fluorocytidine-3'-phosphate
  modified_base 15: mod_base = OTHER; note = 2'-O-methyladenosine-3'-phosphate
  modified_base 16: mod_base = OTHER; note = 2'-deoxy-2'-fluorouridine-3'-phosphate
  modified_base 17: mod_base = OTHER; note = 2'-O-methyluridine-3'-phosphate
  modified_base 18: mod_base = OTHER; note = 2'-O-methylguanosine-3'-phosphate
  modified_base 19: mod_base = OTHER; note = 2'-O-methylcytidine-3'-phosphate
  modified_base 20: mod_base = OTHER; note = 2'-O-methyluridine-3'-phosphate
  modified_base 21: mod_base = OTHER; note = 2'-O-methyladenosine-3'-phosphorothioate
  modified_base 22: mod_base = OTHER; note = 2'-O-methyladenosine-3'-phosphorothioate
  modified_base 23: mod_base = OTHER; note = 2'-O-methylguanosine
taagttatccaaacattgctaag

SEQ ID NO: 2010 - RNA, 23 nt, synthetic construct
  source 1..23: mol_type = other RNA
  modified_base 1: mod_base = OTHER; note = 2'-O-methyluridine-3'-phosphorothioate 5'-(E)-Vinylphosphonate
  modified_base 2: mod_base = OTHER; note = 2'-deoxy-2'-fluorouridine-3'-phosphorothioate
  modified_base 3: mod_base = OTHER; note = 2'-O-methyluridine-3'-phosphate
  modified_base 4: mod_base = OTHER; note = 2'-O-methyladenosine-3'-phosphate
  modified_base 5: mod_base = OTHER; note = 2'-O-methyladenosine-3'-phosphate
  modified_base 6: mod_base = OTHER; note = 2'-deoxy-2'-fluoroadenosine-3'-phosphate
  modified_base 7: mod_base = OTHER; note = 2'-O-methyluridine-3'-phosphate
  modified_base 8: mod_base = OTHER; note = 2'-deoxy-2'-fluoroguanosine-3'-phosphate
  modified_base 9: mod_base = OTHER; note = 2'-deoxy-2'-fluorouridine-3'-phosphate
  modified_base 10: mod_base = OTHER; note = 2'-O-methylguanosine-3'-phosphate
  modified_base 11: mod_base = OTHER; note = 2'-O-methyluridine-3'-phosphate
  modified_base 12: mod_base = OTHER; note = 2'-O-methylguanosine-3'-phosphate
  modified_base 13: mod_base = OTHER; note = 2'-O-methyladenosine-3'-phosphate
  modified_base 14: mod_base = OTHER; note = 2'-deoxy-2'-fluoroadenosine-3'-phosphate
  modified_base 15: mod_base = OTHER; note = 2'-O-methylguanosine-3'-phosphate
  modified_base 16: mod_base = OTHER; note = 2'-deoxy-2'-fluorouridine-3'-phosphate
  modified_base 17: mod_base = OTHER; note = 2'-O-methylcytidine-3'-phosphate
  modified_base 18: mod_base = OTHER; note = 2'-O-methylcytidine-3'-phosphate
  modified_base 19: mod_base = OTHER; note = 2'-O-methyladenosine-3'-phosphate
  modified_base 20: mod_base = OTHER; note = 2'-O-methyluridine-3'-phosphate
  modified_base 21: mod_base = OTHER; note = 2'-O-methyluridine-3'-phosphorothioate
  modified_base 22: mod_base = OTHER; note = 2'-O-methyluridine-3'-phosphorothioate
  modified_base 23: mod_base = OTHER; note = 2'-O-methyluridine
tttaaatgtgtgaagtccatttt

SEQ ID NO: 2011 - RNA, 23 nt, synthetic construct
  source 1..23: mol_type = other RNA
  modified_base 1: mod_base = OTHER; note = 2'-O-methyluridine-3'-phosphorothioate 5'-(E)-Vinylphosphonate
  modified_base 2: mod_base = OTHER; note = 2'-deoxy-2'-fluorouridine-3'-phosphorothioate
  modified_base 3: mod_base = OTHER; note = 2'-O-methyluridine-3'-phosphate
  modified_base 4: mod_base = OTHER; note = 2'-O-methyluridine-3'-phosphate
  modified_base 5: mod_base = OTHER; note = 2'-O-methyladenosine-3'-phosphate
  modified_base 6: mod_base = OTHER; note = 2'-deoxy-2'-fluoroadenosine-3'-phosphate
  modified_base 7: mod_base = OTHER; note = 2'-O-methyladenosine-3'-phosphate
  modified_base 8: mod_base = OTHER; note = 2'-deoxy-2'-fluorouridine-3'-phosphate
  modified_base 9: mod_base = OTHER; note = 2'-deoxy-2'-fluoroguanosine-3'-phosphate
  modified_base 10: mod_base = OTHER; note = 2'-O-methyluridine-3'-phosphate
  modified_base 11: mod_base = OTHER; note = 2'-O-methylguanosine-3'-phosphate
  modified_base 12: mod_base = OTHER; note = 2'-O-methyluridine-3'-phosphate
  modified_base 13: mod_base = OTHER; note = 2'-O-methylguanosine-3'-phosphate
  modified_base 14: mod_base = OTHER; note = 2'-deoxy-2'-fluoroadenosine-3'-phosphate
  modified_base 15: mod_base = OTHER; note = 2'-O-methyladenosine-3'-phosphate
  modified_base 16: mod_base = OTHER; note = 2'-deoxy-2'-fluoroguanosine-3'-phosphate
  modified_base 17: mod_base = OTHER; note = 2'-O-methyluridine-3'-phosphate
  modified_base 18: mod_base = OTHER; note = 2'-O-methylcytidine-3'-phosphate
  modified_base 19: mod_base = OTHER; note = 2'-O-methylcytidine-3'-phosphate
  modified_base 20: mod_base = OTHER; note = 2'-O-methyladenosine-3'-phosphate
  modified_base 21: mod_base = OTHER; note = 2'-O-methyluridine-3'-phosphorothioate
  modified_base 22: mod_base = OTHER; note = 2'-O-methyluridine-3'-phosphorothioate
  modified_base 23: mod_base = OTHER; note = 2'-O-methyluridine
ttttaaatgtgtgaagtccattt

SEQ ID NO: 2012 - RNA, 23 nt, synthetic construct
  source 1..23: mol_type = other RNA
  modified_base 1: mod_base = OTHER; note = 2'-O-methyluridine-3'-phosphorothioate 5'-(E)-Vinylphosphonate
  modified_base 2: mod_base = OTHER; note = 2'-deoxy-2'-fluorouridine-3'-phosphorothioate
  modified_base 3: mod_base = OTHER; note = 2'-O-methyluridine-3'-phosphate
  modified_base 4: mod_base = OTHER; note = 2'-O-methyladenosine-3'-phosphate
  modified_base 5: mod_base = OTHER; note = 2'-O-methylguanosine-3'-phosphate
  modified_base 6: mod_base = OTHER; note = 2'-deoxy-2'-fluoroadenosine-3'-phosphate
  modified_base 7: mod_base = OTHER; note = 2'-O-methyladenosine-3'-phosphate
  modified_base 8: mod_base = OTHER; note = 2'-deoxy-2'-fluoroadenosine-3'-phosphate
  modified_base 9: mod_base = OTHER; note = 2'-deoxy-2'-fluorocytidine-3'-phosphate
  modified_base 10: mod_base = OTHER; note = 2'-O-methyladenosine-3'-phosphate
  modified_base 11: mod_base = OTHER; note = 2'-O-methyladenosine-3'-phosphate
  modified_base 12: mod_base = OTHER; note = 2'-O-methyladenosine-3'-phosphate
  modified_base 13: mod_base = OTHER; note = 2'-O-methyladenosine-3'-phosphate
  modified_base 14: mod_base = OTHER; note = 2'-deoxy-2'-fluoroguanosine-3'-phosphate
  modified_base 15: mod_base = OTHER; note = 2'-O-methylguanosine-3'-phosphate
  modified_base 16: mod_base = OTHER; note = 2'-deoxy-2'-fluoroadenosine-3'-phosphate
  modified_base 17: mod_base = OTHER; note = 2'-O-methyladenosine-3'-phosphate
  modified_base 18: mod_base = OTHER; note = 2'-O-methylcytidine-3'-phosphate
  modified_base 19: mod_base = OTHER; note = 2'-O-methyladenosine-3'-phosphate
  modified_base 20: mod_base = OTHER; note = 2'-O-methylcytidine-3'-phosphate
  modified_base 21: mod_base = OTHER; note = 2'-O-methyladenosine-3'-phosphorothioate
  modified_base 22: mod_base = OTHER; note = 2'-O-methyladenosine-3'-phosphorothioate
  modified_base 23: mod_base = OTHER; note = 2'-O-methyladenosine
tttagaaacaaaaggaacacaaa

SEQ ID NO: 2013 - RNA, 23 nt, synthetic construct
  source 1..23: mol_type = other RNA
  modified_base 1: mod_base = OTHER; note = 2'-O-methyluridine-3'-phosphorothioate 5'-(E)-Vinylphosphonate
  modified_base 2: mod_base = OTHER; note = 2'-deoxy-2'-fluorouridine-3'-phosphorothioate
  modified_base 3: mod_base = OTHER; note = 2'-O-methylcytidine-3'-phosphate
  modified_base 4: mod_base = OTHER; note = 2'-O-methyluridine-3'-phosphate
  modified_base 5: mod_base = OTHER; note = 2'-O-methyladenosine-3'-phosphate
  modified_base 6: mod_base = OTHER; note = 2'-deoxy-2'-fluoroadenosine-3'-phosphate
  modified_base 7: mod_base = OTHER; note = 2'-O-methyluridine-3'-phosphate
  modified_base 8: mod_base = OTHER; note = 2'-deoxy-2'-fluorouridine-3'-phosphate
  modified_base 9: mod_base = OTHER; note = 2'-deoxy-2'-fluorocytidine-3'-phosphate
  modified_base 10: mod_base = OTHER; note = 2'-O-methyladenosine-3'-phosphate
  modified_base 11: mod_base = OTHER; note = 2'-O-methylcytidine-3'-phosphate
  modified_base 12: mod_base = OTHER; note = 2'-O-methyladenosine-3'-phosphate
  modified_base 13: mod_base = OTHER; note = 2'-O-methyladenosine-3'-phosphate
  modified_base 14: mod_base = OTHER; note = 2'-deoxy-2'-fluorocytidine-3'-phosphate
  modified_base 15: mod_base = OTHER; note = 2'-O-methyluridine-3'-phosphate
  modified_base 16: mod_base = OTHER; note = 2'-deoxy-2'-fluorocytidine-3'-phosphate
  modified_base 17: mod_base = OTHER; note = 2'-O-methyluridine-3'-phosphate
  modified_base 18: mod_base = OTHER; note = 2'-O-methyluridine-3'-phosphate
  modified_base 19: mod_base = OTHER; note = 2'-O-methyladenosine-3'-phosphate
  modified_base 20: mod_base = OTHER; note = 2'-O-methylcytidine-3'-phosphate
  modified_base 21: mod_base = OTHER; note = 2'-O-methylguanosine-3'-phosphorothioate
  modified_base 22: mod_base = OTHER; note = 2'-O-methylguanosine-3'-phosphorothioate
  modified_base 23: mod_base = OTHER; note = 2'-O-methyladenosine
ttctaattcacaactcttacgga

SEQ ID NO: 2014 - RNA, 23 nt, synthetic construct
  source 1..23: mol_type = other RNA
  modified_base 1: mod_base = OTHER; note = 2'-O-methyluridine-3'-phosphorothioate 5'-(E)-Vinylphosphonate
  modified_base 2: mod_base = OTHER; note = 2'-deoxy-2'-fluorocytidine-3'-phosphorothioate
  modified_base 3: mod_base = OTHER; note = 2'-O-methyladenosine-3'-phosphate
  modified_base 4: mod_base = OTHER; note = 2'-O-methyladenosine-3'-phosphate
  modified_base 5: mod_base = OTHER; note = 2'-O-methyladenosine-3'-phosphate
  modified_base 6: mod_base = OTHER; note = 2'-deoxy-2'-fluorocytidine-3'-phosphate
  modified_base 7: mod_base = OTHER; note = 2'-O-methyluridine-3'-phosphate
  modified_base 8: mod_base = OTHER; note = 2'-deoxy-2'-fluorouridine-3'-phosphate
  modified_base 9: mod_base = OTHER; note = 2'-deoxy-2'-fluoroadenosine-3'-phosphate
  modified_base 10: mod_base = OTHER; note = 2'-O-methylcytidine-3'-phosphate
  modified_base 11: mod_base = OTHER; note = 2'-O-methyluridine-3'-phosphate
  modified_base 12: mod_base = OTHER; note = 2'-O-methylcytidine-3'-phosphate
  modified_base 13: mod_base = OTHER; note = 2'-O-methyluridine-3'-phosphate
  modified_base 14: mod_base = OTHER; note = 2'-deoxy-2'-fluorouridine-3'-phosphate
  modified_base 15: mod_base = OTHER; note = 2'-O-methylguanosine-3'-phosphate
  modified_base 16: mod_base = OTHER; note = 2'-deoxy-2'-fluoroadenosine-3'-phosphate
  modified_base 17: mod_base = OTHER; note = 2'-O-methylguanosine-3'-phosphate
  modified_base 18: mod_base = OTHER; note = 2'-O-methyluridine-3'-phosphate
  modified_base 19: mod_base = OTHER; note = 2'-O-methyluridine-3'-phosphate
  modified_base 20: mod_base = OTHER; note = 2'-O-methylcytidine-3'-phosphate
  modified_base 21: mod_base = OTHER; note = 2'-O-methyladenosine-3'-phosphorothioate
  modified_base 22: mod_base = OTHER; note = 2'-O-methylcytidine-3'-phosphorothioate
  modified_base 23: mod_base = OTHER; note = 2'-O-methyluridine
tcaaacttactcttgagttcact

SEQ ID NO: 2015 - RNA, 23 nt, synthetic construct
  source 1..23: mol_type = other RNA
  modified_base 1: mod_base = OTHER; note = 2'-O-methyluridine-3'-phosphorothioate 5'-(E)-Vinylphosphonate
  modified_base 2: mod_base = OTHER; note = 2'-deoxy-2'-fluorouridine-3'-phosphorothioate
  modified_base 3: mod_base = OTHER; note = 2'-O-methylcytidine-3'-phosphate
  modified_base 4: mod_base = OTHER; note = 2'-O-methyladenosine-3'-phosphate
  modified_base 5: mod_base = OTHER; note = 2'-O-methyladenosine-3'-phosphate
  modified_base 6: mod_base = OTHER; note = 2'-deoxy-2'-fluoroadenosine-3'-phosphate
  modified_base 7: mod_base = OTHER; note = 2'-O-methylcytidine-3'-phosphate
  modified_base 8: mod_base = OTHER; note = 2'-deoxy-2'-fluorouridine-3'-phosphate
  modified_base 9: mod_base = OTHER; note = 2'-deoxy-2'-fluorouridine-3'-phosphate
  modified_base 10: mod_base = OTHER; note = 2'-O-methyladenosine-3'-phosphate
  modified_base 11: mod_base = OTHER; note = 2'-O-methylcytidine-3'-phosphate
  modified_base 12: mod_base = OTHER; note = 2'-O-methyluridine-3'-phosphate
  modified_base 13: mod_base = OTHER; note = 2'-O-methylcytidine-3'-phosphate
  modified_base 14: mod_base = OTHER; note = 2'-deoxy-2'-fluorouridine-3'-phosphate
  modified_base 15: mod_base = OTHER; note = 2'-O-methyluridine-3'-phosphate
  modified_base 16: mod_base = OTHER; note = 2'-deoxy-2'-fluoroguanosine-3'-phosphate
  modified_base 17: mod_base = OTHER; note = 2'-O-methyladenosine-3'-phosphate
  modified_base 18: mod_base = OTHER; note = 2'-O-methylguanosine-3'-phosphate
  modified_base 19: mod_base = OTHER; note = 2'-O-methyluridine-3'-phosphate
  modified_base 20: mod_base = OTHER; note = 2'-O-methyluridine-3'-phosphate
  modified_base 21: mod_base = OTHER; note = 2'-O-methylcytidine-3'-phosphorothioate
  modified_base 22: mod_base = OTHER; note = 2'-O-methyladenosine-3'-phosphorothioate
  modified_base 23: mod_base = OTHER; note = 2'-O-methylcytidine
ttcaaacttactcttgagttcac

SEQ ID NO: 2016 - RNA, 23 nt, synthetic construct
  source 1..23: mol_type = other RNA
  modified_base 1: mod_base = OTHER; note = 2'-O-methyluridine-3'-phosphorothioate 5'-(E)-Vinylphosphonate
  modified_base 2: mod_base = OTHER; note = 2'-deoxy-2'-fluorouridine-3'-phosphorothioate
  modified_base 3: mod_base = OTHER; note = 2'-O-methyluridine-3'-phosphate
  modified_base 4: mod_base = OTHER; note = 2'-O-methyluridine-3'-phosphate
  modified_base 5: mod_base = OTHER; note = 2'-O-methylcytidine-3'-phosphate
  modified_base 6: mod_base = OTHER; note = 2'-deoxy-2'-fluoroadenosine-3'-phosphate
  modified_base 7: mod_base = OTHER; note = 2'-O-methyladenosine-3'-phosphate
  modified_base 8: mod_base = OTHER; note = 2'-deoxy-2'-fluoroadenosine-3'-phosphate
  modified_base 9: mod_base = OTHER; note = 2'-deoxy-2'-fluorocytidine-3'-phosphate
  modified_base 10: mod_base = OTHER; note = 2'-O-methyluridine-3'-phosphate
  modified_base 11: mod_base = OTHER; note = 2'-O-methyluridine-3'-phosphate
  modified_base 12: mod_base = OTHER; note = 2'-O-methyladenosine-3'-phosphate
  modified_base 13: mod_base = OTHER; note = 2'-O-methylcytidine-3'-phosphate
  modified_base 14: mod_base = OTHER; note = 2'-deoxy-2'-fluorouridine-3'-phosphate
  modified_base 15: mod_base = OTHER; note = 2'-O-methylcytidine-3'-phosphate
  modified_base 16: mod_base = OTHER; note = 2'-deoxy-2'-fluorouridine-3'-phosphate
  modified_base 17: mod_base = OTHER; note = 2'-O-methyluridine-3'-phosphate
  modified_base 18: mod_base = OTHER; note = 2'-O-methylguanosine-3'-phosphate
  modified_base 19: mod_base = OTHER; note = 2'-O-methyladenosine-3'-phosphate
  modified_base 20: mod_base = OTHER; note = 2'-O-methylguanosine-3'-phosphate
  modified_base 21: mod_base = OTHER; note = 2'-O-methyluridine-3'-phosphorothioate
  modified_base 22: mod_base = OTHER; note = 2'-O-methyluridine-3'-phosphorothioate
  modified_base 23: mod_base = OTHER; note = 2'-O-methylcytidine
ttttcaaacttactcttgagttc

SEQ ID NO: 2017 - RNA, 23 nt, synthetic construct
  source 1..23: mol_type = other RNA
tcaatgtgcaatgtctcttttag

SEQ ID NO: 2018 - RNA, 23 nt, synthetic construct
  source 1..23: mol_type = other RNA
aatgtgcaatgtctcttttagca

SEQ ID NO: 2019 - RNA, 23 nt, synthetic construct
  source 1..23: mol_type = other RNA
tgtgcaatgtctcttttagcaaa

SEQ ID NO: 2020 - RNA, 23 nt, synthetic construct
  source 1..23: mol_type = other RNA
gtctccaaacaacacgtttctag

SEQ ID NO: 2021 - RNA, 23 nt, synthetic construct
  source 1..23: mol_type = other RNA
tctccaaacaacacgtttctagc

SEQ ID NO: 2022 - RNA, 23 nt, synthetic construct
  source 1..23: mol_type = other RNA
ctgtgaatccaactgtaaagttc

SEQ ID NO: 2023 - RNA, 23 nt, synthetic construct
  source 1..23: mol_type = other RNA
gaatccaactgtaaagttcttta

SEQ ID NO: 2024 - RNA, 23 nt, synthetic construct
  source 1..23: mol_type = other RNA
aatccaactgtaaagttctttat

SEQ ID NO: 2025 - RNA, 23 nt, synthetic construct
  source 1..23: mol_type = other RNA
atccaactgtaaagttctttatt

SEQ ID NO: 2026 - RNA, 23 nt, synthetic construct
  source 1..23: mol_type = other RNA
tccaactgtaaagttctttattg

SEQ ID NO: 2027 - RNA, 23 nt, synthetic construct
  source 1..23: mol_type = other RNA
ccaactgtaaagttctttattgt

SEQ ID NO: 2028 - RNA, 23 nt, synthetic construct
  source 1..23: mol_type = other RNA
aggaggaagaaatctctataaaa

SEQ ID NO: 2029 - RNA, 23 nt, synthetic construct
  source 1..23: mol_type = other RNA
ctggaagttgaagatcaaattga

SEQ ID NO: 2030 - RNA, 23 nt, synthetic construct
  source 1..23: mol_type = other RNA
tggaagttgaagatcaaattgaa

SEQ ID NO: 2031 - RNA, 23 nt, synthetic construct
  source 1..23: mol_type = other RNA
ggaagttgaagatcaaattgaag

SEQ ID NO: 2032 - RNA, 23 nt, synthetic construct
  source 1..23: mol_type = other RNA
ttaagaccacatttgttctcatt

SEQ ID NO: 2033 - RNA, 23 nt, synthetic construct
  source 1..23: mol_type = other RNA
tttgttctcattatctcaaaagt

SEQ ID NO: 2034 - RNA, 23 nt, synthetic construct
  source 1..23: mol_type = other RNA
ttgttctcattatctcaaaagtg

SEQ ID NO: 2035 - RNA, 23 nt, synthetic construct
  source 1..23: mol_type = other RNA
tgttctcattatctcaaaagtgc

SEQ ID NO: 2036 - RNA, 23 nt, synthetic construct
  source 1..23: mol_type = other RNA
ggctgctttctccagttttacac

SEQ ID NO: 2037 - RNA, 23 nt, synthetic construct
  source 1..23: mol_type = other RNA
ccttagagcaatttggattttcc

SEQ ID NO: 2038 - RNA, 23 nt, synthetic construct
  source 1..23: mol_type = other RNA
ttttctgagaaagactattcaaa

SEQ ID NO: 2039 - RNA, 23 nt, synthetic construct
  source 1..23: mol_type = other RNA
ggttatgtcttgaatcaaactta

SEQ ID NO: 2040 - RNA, 23 nt, synthetic construct
  source 1..23: mol_type = other RNA
tggacacatttgttcaaaggttc

SEQ ID NO: 2041 - RNA, 23 nt, synthetic construct
  source 1..23: mol_type = other RNA
atttgttcaaaggttcttgttta

SEQ ID NO: 2042 - RNA, 23 nt, synthetic construct
  source 1..23: mol_type = other RNA
tttgttcaaaggttcttgtttaa

SEQ ID NO: 2043 - RNA, 23 nt, synthetic construct
  source 1..23: mol_type = other RNA
ttgttcaaaggttcttgtttaac

SEQ ID NO: 2044 - RNA, 23 nt, synthetic construct
  source 1..23: mol_type = other RNA
gttcaaaggttcttgtttaactt

SEQ ID NO: 2045 - RNA, 23 nt, synthetic construct
  source 1..23: mol_type = other RNA
aaggttcttgtttaacttgttag

SEQ ID NO: 2046 - RNA, 23 nt, synthetic construct
  source 1..23: mol_type = other RNA
aggttcttgtttaacttgttaga

SEQ ID NO: 2047 - RNA, 23 nt, synthetic construct
  source 1..23: mol_type = other RNA
ggttcttgtttaacttgttagac

SEQ ID NO: 2048 - RNA, 23 nt, synthetic construct
  source 1..23: mol_type = other RNA
tagctttggagaaatcaattaac

SEQ ID NO: 2049 - RNA, 23 nt, synthetic construct
  source 1..23: mol_type = other RNA
agctttggagaaatcaattaaca

SEQ ID NO: 2050 - RNA, 23 nt, synthetic construct
  source 1..23: mol_type = other RNA
gctttggagaaatcaattaacaa

SEQ ID NO: 2051 - RNA, 23 nt, synthetic construct
  source 1..23: mol_type = other RNA
ctttggagaaatcaattaacaat

SEQ ID NO: 2052 - RNA, 23 nt, synthetic construct
  source 1..23: mol_type = other RNA
ttccagggttttctgtattgttt

SEQ ID NO: 2053 - RNA, 23 nt, synthetic construct
  source 1..23: mol_type = other RNA
tccagggttttctgtattgtttt

SEQ ID NO: 2054 - RNA, 23 nt, synthetic construct
  source 1..23: mol_type = other RNA
cttagcaatgtttggataactta

SEQ ID NO: 2055 - RNA, 23 nt, synthetic construct
  source 1..23: mol_type = other RNA
aaaatggacttcacacatttaaa

SEQ ID NO: 2056 - RNA, 23 nt, synthetic construct
  source 1..23: mol_type = other RNA
aaatggacttcacacatttaaat

SEQ ID NO: 2057 - RNA, 23 nt, synthetic construct
  source 1..23: mol_type = other RNA
tttgtgttccttttgtttctaaa

SEQ ID NO: 2058 - RNA, 23 nt, synthetic construct
  source 1..23: mol_type = other RNA
tccgtaagagttgtgaattagat

SEQ ID NO: 2059 - RNA, 23 nt, synthetic construct
  source 1..23: mol_type = other RNA
agtgaactcaagagtaagtttga

SEQ ID NO: 2060 - RNA, 23 nt, synthetic construct
  source 1..23: mol_type = other RNA
gtgaactcaagagtaagtttgaa

SEQ ID NO: 2061 - RNA, 23 nt, synthetic construct
  source 1..23: mol_type = other RNA
gaactcaagagtaagtttgaaaa

1. A double stranded ribonucleic acid (dsRNA) agent for inhibiting expression of Dipeptidyl peptidase 4 (DPP4) in a cell,
(a) wherein the dsRNA agent comprises a sense strand and an antisense strand forming a double stranded region,
wherein the sense strand comprises a nucleotide sequence comprising at least 15 contiguous nucleotides, with 0, 1, 2, or 3 mismatches, of a portion of the nucleotide sequence of any one of SEQ ID NOs:1-15, or a nucleotide sequence having at least 90% nucleotide sequence identity to a portion of the nucleotide sequence of any one of SEQ ID NOs:1-15, and the antisense strand comprises a nucleotide sequence comprising at least 15 contiguous nucleotides, with 0, 1, 2, or 3 mismatches, of the corresponding portion of the nucleotide sequence of any one of SEQ ID NOs:16-30, or a nucleotide sequence having at least 90% nucleotide sequence identity to a portion of the nucleotide sequence of an one of SEQ ID NOs:16-30; and
wherein the sense strand or the antisense strand is conjugated to one or more lipophilic moieties;
(b) wherein the dsRNA agent comprises a sense strand and an antisense strand forming a double stranded region,
wherein the antisense strand comprises a region complementary to part of an mRNA encoding a DPP4 gene (any one of SEQ ID NOs:1-15), wherein each strand independently is 14 to 30 nucleotides in length; and wherein the sense strand or the antisense strand is conjugated to one or more lipophilic moieties; or
(c) wherein the dsRNA agent comprises a sense strand and an antisense strand forming a double stranded region,
wherein the antisense strand comprises at least 15 contiguous nucleotides differing by no more than 3 nucleotides from any one of the antisense nucleotide sequences in any one of Tables 2-3 and 5-6, wherein each strand independently is 14 to 30 nucleotides in length; and wherein the sense strand or the antisense strand is conjugated to one or more lipophilic moieties; or
(d) wherein the dsRNA agent comprises a sense strand and an antisense strand forming a double stranded region,
wherein the antisense strand comprises at least 15 contiguous nucleotides differing by no more than 3 nucleotides from any one of the nucleotide sequence of nucleotides 1204-1226, 1208-1230, 1209-1231, 1210-1232, 1211-1233, 1212-1234, 1700-1722, 2223-2245, 2224-2246, 2225-2247, or 3232-3254 of SEQ ID NO:6, and the antisense strand comprises at least 15 contiguous nucleotides from the corresponding nucleotide sequence of SEQ ID NO:21, and wherein the sense strand or the antisense strand is conjugated to one or more lipophilic moieties; or
(e) wherein the dsRNA agent comprises a sense strand and an antisense strand forming a double stranded region,
wherein the antisense strand comprises at least 15 contiguous nucleotides differing by no more than 3 nucleotides from any one of the antisense nucleotide sequences in any one of Tables 2-3 and 5-6, wherein each strand independently is 14 to 30 nucleotides in length.

2. (canceled)

3. (canceled)

4. The dsRNA agent of claim 1,
(a) wherein the sense strand or the antisense strand is a sense strand or an antisense strand selected from the group consisting of any of the sense strands and antisense strands in any one of Tables 2-3 and 5-6; and/or
(b) wherein the antisense strand comprises at least 15 contiguous nucleotides differing by no more than three nucleotides from any one of the antisense strand nucleotide sequences of a duplex selected from the group consisting of AD-1286365.1, AD-1286369.1, AD-1286370.1, AD-1286371.1, AD-1286372.1, AD-1286373.1, AD-1286829.1, AD-1287272.1, AD-1287273.1, AD-1287274.1, and AD-1288171.1; and/or
(c) wherein the antisense strand comprises at least 15 contiguous nucleotides differing by no more than 3 nucleotides from the nucleotide sequence of nucleotides 2224-2246 of SEQ ID NO:6, and the antisense strand comprises at least 15 contiguous nucleotides from the corresponding nucleotide sequence of SEQ ID NO:21; and/or
(d) wherein the antisense strand comprises at least 15 contiguous nucleotides differing by no more than three nucleotides from the antisense strand nucleotide sequences of duplex AD-1287273.1; and/or
(e) wherein the antisense strand comprises at least 15 contiguous nucleotides differing by no more than 3 nucleotides from the nucleotide sequence of nucleotides 1211-1233 of SEQ ID NO:6, and the antisense strand comprises at least 15 contiguous nucleotides from the corresponding nucleotide sequence of SEQ ID NO:21; and/or
(f) wherein the antisense strand comprises at least 15 contiguous nucleotides differing by no more than three nucleotides from the antisense strand nucleotide sequences of duplex AD-1286372.1.

5.-16. (canceled)

17. The dsRNA agent of claim 1, wherein the dsRNA agent comprises at least one modified nucleotide.

18. (canceled)

19. (canceled)

20. The dsRNA agent of claim 17, wherein at least one of the modified nucleotides is selected from the group a deoxy-nucleotide, a 3′-terminal deoxythimidine (dT) nucleotide, a 2′-O-methyl modified nucleotide, a 2′-fluoro modified nucleotide, a 2′-deoxy-modified nucleotide, a locked nucleotide, an unlocked nucleotide, a conformationally restricted nucleotide, a constrained ethyl nucleotide, an abasic nucleotide, a 2′-amino-modified nucleotide, a 2′-O-allyl-modified nucleotide, 2′-C-alkyl-modified nucleotide, a 2′-methoxyethyl modified nucleotide, a 2′-O-alkyl-modified nucleotide, a morpholino nucleotide, a phosphoramidate, a non-natural base comprising nucleotide, a tetrahydropyran modified nucleotide, a 1,5-anhydrohexitol modified nucleotide, a cyclohexenyl modified nucleotide, a nucleotide comprising a 5′-phosphorothioate group, a nucleotide comprising a 5′-methylphosphonate group, a nucleotide comprising a 5′ phosphate or 5′ phosphate mimic, a nucleotide comprising vinyl phosphonate, a nucleotide comprising adenosine-glycol nucleic acid (GNA), a nucleotide comprising thymidine-glycol nucleic acid (GNA)S-Isomer, a nucleotide comprising 2-hydroxymethyl-tetrahydrofurane-5-phosphate, a nucleotide comprising 2′-deoxythymidine-3′phosphate, a nucleotide comprising 2′-deoxyguanosine-3′-phosphate, a 2′-0 hexadecyl nucleotide, a nucleotide comprising a 2′-phosphate, a cytidine-2′-phosphate nucleotide, a guanosine-2′-phosphate nucleotide, a 2′-O-hexadecyl-cytidine-3′-phosphate nucleotide, a 2′-O-hexadecyl-adenosine-3′-phosphate nucleotide, a 2′-O-hexadecyl-guanosine-3′-phosphate nucleotide, a 2′-O-hexadecyl-uridine-3′-phosphate nucleotide, a a 5′-vinyl phosphonate (VP), a 2′-deoxyadenosine-3′-phosphate nucleotide, a 2′-deoxycytidine-3′-phosphate nucleotide, a 2′-deoxyguanosine-3′-phosphate nucleotide, a 2′-deoxythymidine-3′-phosphate nucleotide, a 2′-deoxyuridine nucleotide, and a terminal nucleotide linked to a cholesteryl derivative and a dodecanoic acid bisdecylamide group; and combinations thereof.

21.-23. (canceled)

24. The dsRNA agent of claim 20, further comprising at least one phosphorothioate internucleotide linkage.

25. (canceled)

26. The dsRNA agent of claim 1, wherein each strand is no more than 30 nucleotides in length.

27.-37. (canceled)

38. The dsRNA agent of claim 1, wherein one or more lipophilic moieties are conjugated to one or more internal positions on at least one strand.

39.-47. (canceled)

48. The dsRNA agent of claim 1, wherein the one or more lipophilic moieties are conjugated to one or more of the internal positions selected from the group consisting of positions 4-8 and 13-18 on the sense strand, and positions 6-10 and 15-18 on the antisense strand, counting from the 5′-end of each strand.

49.-57. (canceled)

58. The dsRNA agent of claim 1, wherein the lipophilic moiety contains a saturated or unsaturated C4-C30 hydrocarbon chain, and an optional functional group selected from the group consisting of hydroxyl, amine, carboxylic acid, sulfonate, phosphate, thiol, azide, and alkyne.

59.-67. (canceled)

68. The dsRNA agent of claim 1, further comprising a targeting ligand that targets a liver tissue.

69.-74. (canceled)

75. The dsRNA agent of claim 1, further comprising a phosphate or phosphate mimic at the 5′-end of the antisense strand.

76.-78. (canceled)

79. An isolated cell containing the dsRNA agent of claim 1.

80. A pharmaceutical composition for inhibiting expression of a DPP4 gene, comprising the dsRNA agent of claim 1.

81. (canceled)

82. A device for oral inhalative administration comprising the dsRNA agent of claim 1.

83. (canceled)

84. An in vitro method of inhibiting expression of a DPP4 gene in a cell, the method comprising:
(a) contacting the cell with the dsRNA agent of claim 1; and
(b) maintaining the cell produced in step (a) for a time sufficient to obtain degradation of the DPP4 gene, thereby inhibiting expression of the DPP4 gene in the cell.

85.-87. (canceled)

88. A method of treating a subject having a dipeptidyl peptidase 4-(DPP4-) associated disease or a subject at risk of developing a DPP4-associated disease, comprising administering to the subject a therapeutically effective amount of the dsRNA agent of claim 1.

89. The method of claim 88, wherein the subject is a human.

90. The method of claim 88, wherein the DPP4-associated disease is a metabolic disease.

91.-96. (canceled)

97. The method of claim 88, wherein the dsRNA agent is administered to the subject at a dose of about 0.01 mg/kg to about 50 mg/kg.

98. The method of claim 88, wherein the dsRNA agent is administered to the subject subcutaneously: intravenously: orally: or by pulmonary system administration.

99.-101. (canceled)

102. The method of claim 88, further comprising administering to the subject an additional agent or a therapy suitable for treatment or prevention of a DPP4-associated disorder.

103. (canceled)

104. (canceled)
